(19) United States
(12) Patent Application Publication
(10) Pub. No.: US 2023/0273222 A1
(43) Pub. Date: Aug. 31, 2023

(54) PREDICTION AND EARLY DIAGNOSIS OF ACUTE KIDNEY INJURY

(71) Applicant: SCIOMICS GMBH, Neckargemünd (DE)

(72) Inventors: Anne GRIESBECK, Dossenheim (DE); Camille LOWY, Heidelberg (DE); Florian SKWIRBLIES, Neckarsteinach (DE); Marco KLEIN, Neckargemünd (DE); Christoph SCHRÖDER, Heidelberg (DE)

(73) Assignee: SCIOMICS GMBH, Neckargemünd (DE)

(21) Appl. No.: 17/917,085

(22) PCT Filed: Apr. 7, 2021
(86) PCT No.: PCT/EP2021/059115

§ 371 Date: Oct. 5, 2022

(30) Foreign Application Priority Data
Apr. 7, 2020 (EP) 20168527.8

(51) Int. Cl. G01N 33/68

(52) U.S. Cl. CPC G01N 33/6893; G01N 2800/347; G01N 2333/555; G01N 2333/54; G01N 2333/916; G01N 2800/60

(57) ABSTRACT

The present invention relates to prediction and early diagnosis of acute kidney injury (AKI). The method provides biomarkers that correlate with a patient's risk of developing AKI, or with the presence of early stage AKI. The invention also provides devices and kits for predicting the risk of occurrence of AKI and for diagnosing AKI.

### SEQUENCE LISTING

[0001] A sequence listing in electronic (ASCII text file) format is filed with this application and incorporated herein by reference. The name of the ASCII text file is “Sequence_listing_v2.txt”; the file was created on May 9, 2023; the size of the file is 1,304,443 bytes.

### SUMMARY

[0002] The present invention pertains to the field of organ failure prediction and early diagnosis. In an aspect, the invention relates to a method for predicting the risk of acute kidney injury (AKI) and/or diagnosing AKI at an early time point.

[0003] The invention comprises the steps of determining the amount of at least one biomarker selected from the biomarkers shown in Table 1, and comparing the amount of said at least one biomarker with a reference amount for said at least one biomarker, whereby the risk of occurrence of AKI is predicted and/or AKI is timely diagnosed. The inventors identified different sets of biomarkers.

[0004] In an aspect, the present invention relates to a method for predicting the risk of AKI and/or diagnosing AKI at an early time point upon a medical intervention. More preferably, the present invention relates to a method for predicting the risk of AKI and/or diagnosing AKI at an early time point upon a surgical intervention. More preferably, the present invention relates to a method for predicting the risk of AKI and/or diagnosing AKI at an early time point upon solid organ transplantation (sTx) and/or upon cardiac surgery. More preferably, the present invention relates to a method for predicting the risk of AKI and/or diagnosing AKI at an early time point upon lung transplantation (LuTx), upon kidney transplantation, upon heart valve repair or replacement, upon coronary artery bypass graft (CABG), upon transmyocardial laser revascularization and/or upon heart transplantion.

[0005] The present invention also contemplates a method for stratifying subjects for a change of therapy plan in order to improve patients' outcome. The method may include stratification for additional medication to stabilize kidney function. In an embodiment, the invention may contemplate a diagnostic test useful as a companion diagnostic to a therapeutic drug to determine its applicability to a specific person (companion diagnostic test). Encompassed are, furthermore, diagnostic devices and kits for carrying out the methods disclosed herein.

### BACKGROUND OF THE INVENTION

[0006] Kidney/AKI

[0007] The kidney is responsible for water and solute excretion from the body. Its functions include maintenance of acid-base balance, regulation of electrolyte concentrations, control of blood volume, and regulation of blood pressure. As such, loss of kidney function through injury and/or disease results in substantial morbidity and mortality. Renal disease and/or injury may be acute and/or chronic. Acute kidney injury (AKI) is an abrupt (typically detected within about 48 hours to 1 week) reduction in renal function with loss of filtration capacity. This results in retention of nitrogenous and non-nitrogenous waste products that are normally excreted by the kidney resulting in acid-base imbalance and electrolyte imbalance. This results in turn in a change in urine output, overhydration and an increase in non-nitrogenous and nitrogenous metabolic waste products such as the serum renal retention parameters creatinine and urea. The symptoms accompanying AKI are very diverse and may include decreased urine production, nausea and vomiting, high blood pressure, abdominal and chest pain, edema, shortness of breath, confusion, seizure or coma, confusion or fatigue. However, AKI can also be symptom-free, especially at early stages. AKI includes diagnosis codes N17.0, N17.1, N17.2, N17.8 and N17.9 according to ICD-10 (2019).

[0008] Etiological Groups

[0009] Clinically, AKI can be classified into 3 etiological groups:
[0010] prerenal—an adaptive response to severe renal hypoperfusion due to major bleeding, hypotension and ischemia reperfusion injury,
[0011] renal or intrinsic—a response to cytotoxic, ischemic or inflammatory injury of the kidney or autoimmune diseases affecting the kidney (i.e. glomerulonephritis, interstitial nephritis and others) with structural and functional damage, and
[0012] postrenal—the result of the mechanical obstruction of the urinary tract (i.e. prostate hypertrophy, obstructive uropathy, stones)

[0013] Prerenal AKI can be the consequence of hypovolemia resulting from conditions such as hemorrhage; impaired cardiac output resulting from congestive heart failure; decreased vascular resistance resulting from conditions such as sepsis or renal vasoconstriction from vasoconstrictive medications. Prerenal AKI often leads to intrinsic AKI if not treated correctly.

[0014] Renal etiologies of AKI are very diverse and can affect all four structures of the kidney, meaning that the damages can be tubular, glomerular, interstitial or vascular. The main causes of the renal etiology of AKI are ischemia, for example as a consequence of surgery; nephrotoxicity, for example resulting from radiocontrast media or certain types of antibiotics; acute glomerulonephritis; acute interstitial nephritis or vascular injury of the kidney due for example to malignant hypertension.

[0015] Causes of postrenal AKI are characterized by an obstruction of the urinary flow, which can be due for example to prostate or gynecological cancers, fibrosis or ureteral valve disease or kidney stones.

[0016] Prevalence of AKI

[0017] In the Western hemisphere, AKI has become primarily a nosocomial disease and it is a very common clinical condition in critically ill patients and after major surgeries. Indeed, AKI occurs in 5-7% of hospitalized patients (Basile et al., 2012). In addition, incidence of AKI is 5-7.5% for all acute care hospitalizations and accounts for up to 52.6% of all patients on intensive care units (ICUs) (Fuhrman et al., 2018). Surgical intervention is a major risk factor for AKI with 50% of the patients facing AKI during the peri-operative hospital stay (Hobson et al., 2016). After solid organ tx (tx=transplantation) incidence rates are between 25% (after kidney tx) and up to 65% (after liver tx) in the peri-operative period (Kalisvaart et al., 2018). After lung tx (LuTx) AKI incidence is of 50-65% (Wehbe et al., 2013; Wehbe et al., 2012). Moreover, incidence of AKI is up to 70% upon hematopoietic cell transplantation (Kogon & Hingorani, 2010). The incidence of AKI in men is 1.6-fold higher than in women (Brown et al., 2016). AKI also increases patients' morbidity and the length of in-hospital stay. Furthermore, long-term consequences of AKI such as chronic kidney disease (CKD) can lead to the need of dialysis, renal replacement therapy (RRT) or kidney transplantation. Therefore, AKI is associated with significant healthcare costs.

[0018] Classification of AKI

[0019] The first classification system for defining and detecting AKI emerged in 2002 and was published as RIFLE (Risk, Injury, Failure, Loss of kidney function, and ESKD-End-stage kidney disease) classification in 2004 (Bellomo et al., 2004). The RIFLE classification is based on three clinical parameters (SCreat: serum creatinine or GFR: glomerular filtration rate and UO: urine output) and defines three severity classes (Risk, Injury and Failure) and two outcome classes (Loss of kidney function and End-stage kidney disease, ESKD) as follows:
[0020] “Risk”: SCreat 1.5 fold increased or GFR decreased >25% and UO<0.5 ml/kg/h during 6 hours;
[0021] “Injury”: SCreat 2.0 fold increased or GFR decreased >50% and UO<0.5 ml/kg/h during 12 hours;
[0022] “Failure”: SCreat 3.0 fold increased or SCreat >4 mg/dl and GFR decreased >75% and UO<0.3 ml/kg/h during 24 hours or anuria for at least 12 hours;
[0023] “Loss”: Persistent need for renal replacement therapy for more than 4 weeks;
[0024] “ESKD”: need for dialysis for more than 3 months.

[0025] As an example, a patient with a UO of more than 0.5 ml/kg/h during 6 hours and a two-fold increase in SCreat will be categorized in the Injury class. The RIFLE classification leads to a high sensitivity and a low specificity for the mild classes (Risk and Injury), i.e. patients without renal failure will be falsely included in the Risk class. On the opposite, the End-stage kidney disease class has a high specificity and a low sensitivity. Therefore, it will miss some patients.

[0026] Although the RIFLE classification has been largely validated in terms of AKI diagnosis and prognosis in various clinical settings (Lopes & Jorge, 2013), it has a number of important limitations. Among those limitations are the requirement of a baseline SCreat value, the limited accuracy of the urine output measurement and the role of several confounding factors on the urine output measurement such as diabetes, the use of diuretics or the hydration status.

[0027] In an attempt to further improve the outcome of AKI patients, the AKI Network proposed a new classification in 2007 (Mehta et al., 2007). In this classification, the two outcome classes were removed and the Risk, Injury and Failure classes were replaced by the categories AKIN1, AKIN2 and AKIN3. Furthermore, some modifications were made compared to the RIFLE classification: before diagnosing AKI, an adequate status of hydration shall be achieved and urinary obstruction shall be ruled out. The AKIN1 class is broadened compared to RISK class as it includes an increase in SCreat of more than or equal to 0.3 mg/dl even if it does not reach 1.5-fold from the baseline. In addition, the use of GFR as a clinical parameter was discarded as this added additional complexity to the classification system.

[0028] AKIN Classification for AKI as Proposed by Mehta et al., 2007.

| Stage | Serum creatinine (SCreat) criteria | Urine output criteria |
|---|---|---|
| AKIN1 | Increase in SCreat of more than or | Less than 0.5 ml/kg per hour |
| | equal to 0.3 mg/dl (>26.4 μmol/l) or | for more than 6 hours |
| | increase to more than or equal to | |
| | 150% to 200% (1.5- to 2-fold) | |
| | from base-line | |
| AKIN2 | Increase in SCreat to more than | Less than 0.5 ml/kg per |
| | 200% to 300% (>2- to 3-fold) | hour for more than 12 hours |
| | from baseline | |
| AKIN3 | Increase in SCreat to more than | Less than 0.3 ml/kg per |
| | 300% (>3-fold)from baseline (or | hour for 24 hours or anuria |
| | more than or equal to 4.0 mg/dl | for 12 hours |
| | [≥354 μmol/l] with an acute | |
| | increase of at least 0.5 mg/dl | |
| | [44 μmol/l] | |

[0029] The present invention relies on the AKIN classification system for classifying the patients into two groups: AKI, which corresponds to AKIN stages 1, 2 and 3; and control, corresponding to patients showing no sign of AKI according to the AKIN classification.

[0030] One of the major drawbacks of the AKIN classification system is the fact that AKI can only be diagnosed if an increase (SCreat) or a drop (UO) of the clinical parameters occurs within a 48 h period. Therefore, patients with an AKI that develops within a longer period might be missed by this classification system. The AKIN classification is a slightly modified version of the RIFLE classification and some of its limitations are very similar to those of the RIFLE classification. The major common limitation of both classification systems is the fact that the clinical parameters used for the staging of the patients are influenced by various confounding aspects such as gender, age or volume status, resulting in a limited reliability. In addition, the classification systems do not allow an early detection of AKI and today there is no assay available that allows predicting the individual risk for AKI prior to surgery or ICU admission.

[0031] Biomarkers in the Field of AKI

[0032] So far, only a few biomarkers have been described for assessing the individual risk of AKI. As far as the diagnosis of AKI is concerned, current AKI diagnostics is mainly based on monitoring serum creatinine elevation and the decrease of the glomerular filtration rate or urine output. These parameters are influenced by gender, age, and volume status and therefore they are insufficient for early detection.

[0033] Currently, discussed biomarkers for AKI prediction and diagnosis are NGAL, Kim-1, IL18, L-FABP, AGT as well as TIMP-2 and IGFBP7, both of the latter are assessed by the US Food and Drug Administration (FDA)-approved NephroCheck® (Astute Medical, Inc.) test. NephroCheck® has limited reliability (sensitivity 76%, false positive rate ˜50%) and other biomarkers have the disadvantage of being only transiently (NGAL) or late stage deregulated (KIM1).

[0034] Thus, there is still a strong need for more reliable biomarkers for prediction and early diagnosis of AKI. Moreover, diagnosis and further personalized treatment of subjects with AKI would be beneficial for improving patients' outcome and for the cost-efficiency of the health system.

[0035] Proteins, as the end product or the acting products of gene expression play a vital role in all activities of a cell. Proteins, as readily available through many body fluids such as plasma, urine and tissue extracts, provide the immediate option for clinical analysis. Proteomic technologies are important for the discovery of clinically relevant biomarkers in various indications.

### DETAILED DESCRIPTION OF THE INVENTION

[0036] The present invention methods of predicting AKI and methods of diagnosing early stage AKI.

[0037] Method

[0038] The method of this invention is suitable for predicting the risk of occurrence of acute kidney injury (AKI) or for early diagnosis of AKI in a subject, comprising determining in a sample obtained from the subject the amount of at least one biomarker, and comparing the amount of the biomarker with a reference amount for the biomarker. Preferably, the biomarkers of the present invention are of human origin, including human proteins and human carbohydrates.

[0039] In an aspect, the invention relates to a method for predicting the risk of occurrence of acute kidney injury (AKI) or for early diagnosis of AKI in a subject, comprising the steps of:
[0040] a. determining in a sample obtained from the subject the amount of at least one biomarker selected from the group consisting of

[0041] CD9 antigen, Prostaglandin G/H synthase 2, CD15, CD99 antigen, CD99R antigen, High affinity immunoglobulin epsilon receptor subunit alpha, Ligands of Tumor necrosis factor receptor superfamily member 1B including Tumor necrosis factor and Lymphotoxin-alpha, Tumor necrosis factor receptor superfamily member 6, Interferon alpha-1/13, Basigin, C-C motif, chemokine 7, Dickkopf-related protein 2, Hyaluronan mediated motility receptor, Interleukin-18, Interleukin-7, Major prion protein, Receptor-type tyrosine-protein phosphatase C, P-selectin glycoprotein ligand 1, Tumor necrosis factor ligand superfamily member 14, DNA topoisomerase 2-alpha, Brain-derived neurotrophic factor, Caspase-8, Eotaxin, C-C motif chemokine 3, C-C motif chemokine 5, Monocyte differentiation antigen CD14, Cytokine receptor-like factor 2, Lamin-B1, Cellular tumor antigen p53, Serine/threonine-protein kinase PAK 1, Caspase-9, Transforming growth factor-beta-induced protein ig-h3, Leukocyte surface antigen CD47, T-cell surface glycoprotein CD8 alpha chain, Dickkopf-related protein 3, Growth arrest-specific protein 6, Interleukin-15, Cytokine receptor common subunit beta, Keratin type II cytoskeletal 8, Leukosialin, MAP/microtubule affinity-regulating kinase 4, Melanophilin, Interstitial collagenase, Matrilysin, Prostaglandin G/H synthase 1, Myeloblastin, RNA-binding protein 3, Serum amyloid P-component, Tetraspanin-16, Urokinase-type plasminogen activator, CTP synthase 1, CD139, Max dimerization protein 4, Transmembrane protein 54, Actin cytoplasmic 1, Caspase-3, Complement decay-accelerating factor, High mobility group protein B2, Homeobox protein, Hox-C11, Intercellular adhesion molecule 1, Interleukin-12 subunit alpha, Krueppel-like factor 8, Galectin-4, Ragulator complex protein LAMTOR1, L-selectin, Mitogen-activated protein kinase 3, Mucin-5B, Nuclear factor of activated T-cells, Transforming growth factor beta-1 proprotein, Serine/threonine-protein kinase VRK1, Cyclin-dependent kinase inhibitor 3, Tissue factor pathway inhibitor 2, Microtubule-associated proteins 1A/B light chain 3B, Phosphatidylinositol 3,4,5-trisphosphate 3-phosphatase and dual-specificity protein phosphatase PTEN, Interleukin-8, Rho guanine nucleotide exchange factor 2, CASP8 and FADD-like apoptosis regulator, CUE domain-containing protein 2, Death-associated protein kinase 1, Endothelin-1 receptor, Eukaryotic translation initiation factor 3 subunit B, DNA-binding protein inhibitor ID-2, Prelamin-A/C, CAD protein, Zinc finger protein 593, Mitogen-activated protein kinase 12, Cytochrome P450 1B1, Angiotensinogen, Adenomatous polyposis coli protein, POU domain class 2 transcription factor 1, Somatostatin receptor type 4, Tumor necrosis factor alpha-induced protein 3, E3 ubiquitin-protein ligase TRIM22, Complement factor D, Neurotrophin-4, Insulin-like growth factor-binding protein 1, Cystatin-B, Interleukin-18-binding protein, WAP four-disulfide core domain protein 2, Haptoglobin, Uteroglobin, Chitinase-3-like protein 1, Elafin, Cartilage oligomeric matrix protein, Interleukin-16 and Inter-alpha-trypsin inhibitor heavy chain H1, as well as combinations thereof and isoforms, fragments and variants thereof (the list corresponds to SEQ ID No. 1 to 304 as well as CD15 and CD139; and
[0042] b. comparing the amount of the biomarker with a reference amount for the biomarker.

[0043] The present inventors identified 92 biomarkers (shown in Table 1). 79 thereof have proven to be particularly useful for predicting the risk of occurrence of AKI (shown in Table 2) and 26 thereof have proven to be particularly useful for early diagnosis of AKI (shown in Table 3), respectively. 12 biomarkers have proven to be particularly useful for both predicting the risk of occurrence of AKI and for early diagnosis of AKI (shown in Table 4). 35 biomarkers have shown a higher abundance in connection with AKI (shown in Table 5) and 68 biomarkers have shown lower abundance in connection with AKI (shown in Table 6).

[0044] In an embodiment, the method includes determining the amount of biomarkers that are downregulated in subjects having AKI or being at risk of developing AKI. In an embodiment, the biomarkers have a log FC of less than −0.7. In an embodiment, the method includes determining the amount of biomarkers that are upregulated in subjects having AKI or being at risk of developing AKI. In an embodiment, the biomarkers have a log FC of at least 0.7.

[0045] “log FC” is defined as the log fold change calculated for the basis 2 and represents the differences in protein abundance/amount between AKI patients and patients without AKI. The amount may be determined using an antibody microarray as disclosed herein, such as disclosed in the example section. A log FC=1 means that AKI patients have on average a 21=2 fold higher abundance of biomarker as compared to patients without AKI. log FC=−1 stands for 2⁻¹=½ of the abundance of biomarker in AKI patients compared to patients without AKI.

[0046] All of the methods disclosed herein may include the step of predicting the risk of the subject of developing AKI based on a comparison of the amount of the biomarker with a reference amount of the biomarker. For biomarkers that are upregulated in subjects with AKI, an increased amount of the biomarker compared with the reference amount may indicate that the subject has AKI. For biomarkers that are upregulated in subjects with a risk of developing AKI, an increased amount of the biomarker compared with the reference amount may indicate that the subject is at risk of developing AKI. For biomarkers that are downregulated in subjects with AKI, a decreased amount of the biomarker compared with the reference amount may indicate that the subject has AKI. For biomarkers that are downregulated in subjects with a risk of developing AKI, a decreased amount of the biomarker compared with the reference amount may indicate that the subject is at risk of developing AKI.

[0047] Determining the amount of biomarker in a sample may include biomarker detection. Biomarker detection may include binding the biomarker to a binding agent. The binding agent may be selected from proteins that bind specifically to the respective biomarker. Examples of such proteins include antibodies. Another example is a receptor in case the biomarker is a ligand to the receptor. The binding agent can be immobilized on a substrate. For example, most of the biomarkers of this invention can be detected using immobilized antibodies.

[0048] Some of the biomarkers described herein are ligands of the Tumor necrosis factor receptor superfamily member 1B. For these markers, an immobilized Fc-Tumor necrosis factor receptor superfamily member 1B-Fusion protein can be used for capturing ligands of this receptor as an alternative to using antibodies. The ligands include Tumor necrosis factor and Lymphotoxin-alpha (SEQ ID No. 251-252). Examples of such ligands include marker no. 5 in table 1, marker no. 4 in table 2; and/or marker no. 5 in table 6. Evidence for the usefulness of all these biomarkers is given in the example section. Generally, all of these biomarkers are useful for predicting and diagnosing AKI.

[0049] In an embodiment, the method includes determining the amount of at least one biomarker that is upregulated in connection with AKI. In this embodiment, the invention relates to a method for predicting the risk of occurrence of acute kidney injury (AKI) or for early diagnosis of AKI in a subject, comprising the steps of:
[0050] a. determining in a sample obtained from the subject the amount of at least one biomarker that is upregulated in connection with AKI selected from the group consisting of

[0051] Interferon alpha-1/13, Cellular tumor antigen p53, Caspase-9, Interleukin 7, Interleukin-18, Serum amyloid P-component, Urokinase-type plasminogen activator, Keratin type II cytoskeletal 8, Eotaxin, Max dimerization protein 4, Interleukin-15, CTP synthase 1, Cytokine receptor-like factor 2, RNA-binding protein 3, Transmembrane protein 54, C-C motif chemokine 7, Homeobox protein Hox-C11, Ragulator complex protein LAMTOR1, Transforming growth factor beta-1 proprotein, High mobility group protein B2, Intercellular adhesion molecule 1, Complement decay-accelerating factor, Microtubule-associated proteins 1A/1B light chain 3B, Phosphatidylinositol 3,4,5-trisphosphate 3-phosphatase and dual-specificity protein phosphatase PTEN, Caspase-8, Growth arrest-specific protein 6, Interstitial collagenase, Eukaryotic translation initiation factor 3 subunit B, Zinc finger protein 593, Endothelin-1 receptor, CASP8 and FADD-like apoptosis regulator, DNA-binding protein inhibitor ID-2, Mitogen-activated protein kinase 12, POU domain class 2 transcription factor 1, E3 ubiquitin-protein ligase TRIM22, Galectin-4, Major prion protein, Complement factor D, Insulin-like growth factor-binding protein 1, Cystatin-B, WAP four-disulfide core domain protein 2, Uteroglobin, Chitinase-3-like protein 1, Elafin and Cartilage oligomeric matrix protein, as well as combinations thereof and isoforms, fragments and variants thereof, and
[0052] b. comparing the amount of the biomarker with a reference amount for the biomarker.

[0053] These biomarkers have shown higher abundance in connection with AKI. The listed upregulated biomarkers correspond to SEQ ID Nos. 13, 69-77, 80-83, 27-29, 25-26, 122, 127-128, 102-103, 61, 131, 98-99, 129-130, 65-67, 121, 132-134, 18, 145, 153, 184, 144, 146, 137-143, 190, 191-193, 52-60, 93-97, 112, 223-224, 233, 218-222, 198-212, 225, 234-235, 241-246, 249-250, 30, 152, 253-255, 259-265, 271-276, and 282-294 respectively.

[0054] As used in this description, a biomarker that is upregulated or downregulated “in connection with AKI” means that the biomarker is up- or downregulated, respectively, in subjects who are at risk of developing AKI, or who have (e.g. early stage) AKI.

[0055] In an embodiment, the method includes determining the amount of at least one biomarker that is downregulated in connection with AKI. In this embodiment, the invention relates to a method for predicting the risk of occurrence of acute kidney injury (AKI) or for early diagnosis of AKI in a subject, comprising the steps of:
[0056] a. determining in a sample obtained from the subject the amount of at least one biomarker that is downregulated in connection with AKI selected from the group consisting of

[0057] Prostaglandin G/H synthase 2, CD15, CD99 antigen, CD99R antigen, Tumor necrosis factor receptor superfamily member 6, Ligands of Tumor necrosis factor receptor superfamily member 1B including Tumor necrosis factor and Lymphotoxin-alpha, High affinity immunoglobulin epsilon receptor subunit alpha, CD9 antigen, Dickkopf-related protein 2, C-C motif chemokine 7, DNA topoisomerase 2-alpha, Receptor-type tyrosine-protein phosphatase C, Major priori protein, P-selectin glycoprotein ligand 1, Interleukin-7, Basigin, Hyaluronan mediated motility receptor, Interleukin-18, Tumor necrosis factor ligand superfamily member 14, Serine/threonine-protein kinase PAK 1, Lamin-B1, Monocyte differentiation antigen CD14, Eotaxin, Caspase-8, C-C motif chemokine 3, Brain-derived neurotrophic factor, C-C motif chemokine 5, Cytokine receptor-like factor 2, Leukocyte surface antigen CD47, Leukosialin, Interstitial collagenase, Melanophilin, Myeloblastin, Dickkopf-related protein 3, MAP/microtubule affinity-regulating kinase 4, Transforming growth factor-beta-induced protein ig-h3, Cytokine receptor common subunit beta, Prostaglandin G/H synthase 1, Growth arrest-specific protein 6, RNA-binding protein 3, T-cell surface glycoprotein CD8 alpha chain, Interleukin-15, Tetraspanin-16, Matrilysin, Interferon alpha-1/13, CD139, Nuclear factor of activated T-cells, L-selectin, Actin cytoplasmic 1, Krueppel-like factor 8, Interleukin-12 subunit alpha, Interleukin-8, Mitogen-activated protein kinase 3, Caspase-3, Galectin-4, Mucin-5B, Serine/threonine-protein kinase VRK1, Cyclin-dependent kinase inhibitor 3, Tissue factor pathway inhibitor 2, Rho guanine nucleotide exchange factor 2, Prelamin-A/C, CAD protein, Death-associated protein kinase 1, CUE domain-containing protein 2, Cytochrome P450 1B1, Somatostatin receptor type 4, Angiotensinogen, Adenomatous polyposis coli protein, Tumor necrosis factor alpha-induced protein 3, Neurotrophin-4, Interleukin-18-binding protein, Haptoglobin, Interleukin-16 and Inter-alpha-trypsin inhibitor heavy chain H1, as well as combinations thereof and isoforms, fragments and variants thereof, and
[0058] b. comparing the amount of the biomarker with a reference amount for the biomarker.

[0059] These biomarkers have shown lower abundance in AKI. The listed downregulated biomarkers correspond to SEQ ID Nos. 1, 2-4, 6-12, 5, 19, 20, 18, 43-46, 31-38, 30, 39-40, 27-29, 14-17, 21-24, 25-26, 41-42, 78-79, 68, 64, 61, 52-60, 62, 47-51, 63, 65-67, 85-88, 104, 112, 107-111, 120, 92, 105-106, 84, 100-101, 114-119, 93-97, 121, 89-91, 98, 123-126, 113, 13, 160-183, 154-155, 135, 148-151, 147, 194, 156-158, 136, 152, 159, 185, 186, 188-189, 195-197, 226-231, 232, 214-217, 213, 236, 247, 237, 238-240, 248, 251-252, 256-258, 266-270, 277-281, and 295-304 respectively, as well as CD15 and CD139.

[0060] The following methods are preferred methods. The sets of biomarkers used in the preferred methods have shown to be particularly useful for predicting the risk of occurrence of AKI and/or early diagnosis of AKI. In the following passages only step a. is indicated. Preferably, the methods also include the following step subsequent to step a.:
[0061] b. comparing the amount of the biomarker with a reference amount for the biomarker.

[0062] In an aspect, the invention relates to a method for predicting the risk of occurrence of acute kidney injury (AKI) or for early diagnosis of AKI in a subject, comprising the step of:
[0063] a. determining in a sample obtained from the subject the amount of at least one biomarker selected from the group consisting of CD15 and Interferon alpha-1/13, as well as combinations thereof and isoforms, fragments and variants thereof. These biomarkers are showing an excellent quality score of 6.

[0064] In an aspect, the invention relates to a method for predicting the risk of occurrence of acute kidney injury (AKI) or for early diagnosis of AKI in a subject, comprising the step of:
[0065] a. determining in a sample obtained from the subject the amount of at least one biomarker selected from the group consisting of Nuclear factor of activated T-cells, Complement factor D, Insulin-like growth factor-binding protein 1, Haptoglobin, as well as combinations thereof and isoforms, fragments and variants thereof. These biomarkers are showing an excellent quality score of 6.

[0066] In an aspect, the invention relates to a method for predicting the risk of occurrence of acute kidney injury (AKI) or for early diagnosis of AKI in a subject, comprising the step of:
[0067] a. determining in a sample obtained from the subject the amount of at least one biomarker selected from the group consisting of CD9 antigen, Dickkopf-related protein 2 and Hyaluronan mediated motility receptor, as well as combinations thereof and isoforms, fragments and variants thereof. These biomarkers are showing an excellent quality score of 5.

[0068] In an aspect, the invention relates to a method for predicting the risk of occurrence of acute kidney injury (AKI) or for early diagnosis of AKI in a subject, comprising the step of:
[0069] a. determining in a sample obtained from the subject the amount of at least one biomarker selected from the group consisting of Cytokine receptor-like factor 2, and Lamin-B1, as well as combinations thereof and isoforms, fragments and variants thereof. These biomarkers are showing a very high quality score of 4.

[0070] In an aspect, the invention relates to a method for predicting the risk of occurrence of acute kidney injury (AKI) or for early diagnosis of AKI in a subject, comprising the step of:
[0071] a. determining in a sample obtained from the subject the amount of at least one biomarker selected from the group consisting of Major prion protein, Interleukin-18-binding protein, Elafin, Cartilage oligomeric matrix protein, as well as combinations thereof and isoforms, fragments and variants thereof. These biomarkers are showing a very high quality score of 4.

[0072] In an aspect, the invention relates to a method for predicting the risk of occurrence of acute kidney injury (AKI) or for early diagnosis of AKI in a subject, comprising the step of:
[0073] a. determining in a sample obtained from the subject the amount of at least one biomarker selected from the group consisting of Cytokine receptor common subunit beta, Leukosialin, MAP/microtubule affinity-regulating kinase 4, Melanophilin, Myeloblastin, RNA-binding protein 3, Serum amyloid P-component and Tetraspanin-16, as well as combinations thereof and isoforms, fragments and variants thereof. These biomarkers are showing a high quality score of 3.

[0074] In an aspect, the invention relates to a method for predicting the risk of occurrence of acute kidney injury (AKI) or for early diagnosis of AKI in a subject, comprising the step of:
[0075] a. determining in a sample obtained from the subject the amount of at least one biomarker selected from the group consisting of CD99 antigen, CD99R antigen, Inter-alpha-trypsin inhibitor heavy chain H1, as well as combinations thereof and isoforms, fragments and variants thereof. These biomarkers are showing a high quality score of 3.

[0076] In an aspect, the invention relates to a method for predicting the risk of occurrence of acute kidney injury (AKI) or for early diagnosis of AKI in a subject, comprising the step of:
[0077] a. determining in a sample obtained from the subject the amount of at least one biomarker selected from the group consisting of Dickkopf-related protein 2 and Interferon alpha-1/13, as well as combinations thereof and isoforms, fragments and variants thereof. These biomarkers are showing an excellent quality score of 5 to 6. They are also secreted biomarkers making them particularly suitable candidates for detection in urine, blood, plasma or serum.

[0078] In an aspect, the invention relates to a method for predicting the risk of occurrence of acute kidney injury (AKI) or for early diagnosis of AKI in a subject, comprising the step of:
[0079] a. determining in a sample obtained from the subject the amount of at least one biomarker selected from the group consisting of Neurotrophin-4 and Complement factor D, as well as combinations thereof and isoforms, fragments and variants thereof. These biomarkers are showing an excellent quality score of 5 to 6. They are also secreted biomarkers making them particularly suitable candidates for detection in urine, blood, plasma or serum.

[0080] In an aspect, the invention relates to a method for predicting the risk of occurrence of acute kidney injury (AKI) or for early diagnosis of AKI in a subject, comprising the step of:
[0081] a. determining in a sample obtained from the subject the amount of at least one biomarker selected from the group consisting of Dickkopf-related protein 2, Cytokine receptor-like factor 2 and Serum amyloid P-component, as well as combinations thereof and isoforms, fragments and variants thereof. These biomarkers are showing a very high to excellent quality score of 3 to 6. They are also secreted biomarkers making them particularly suitable candidates for detection in urine, blood, plasma or serum.

[0082] In an aspect, the invention relates to a method for predicting the risk of occurrence of acute kidney injury (AKI) or for early diagnosis of AKI in a subject, comprising the step of:
[0083] a. determining in a sample obtained from the subject the amount of at least one biomarker selected from the group consisting of CD9 antigen, CD15 and Hyaluronan mediated motility receptor, as well as combinations thereof and isoforms, fragments and variants thereof. These biomarkers are showing an excellent quality score of 5 to 6. They are also membrane biomarkers making them particularly suitable candidates for detection in urine, blood, plasma or serum.

[0084] In an aspect, the invention relates to a method for predicting the risk of occurrence of acute kidney injury (AKI) or for early diagnosis of AKI in a subject, comprising the step of:
[0085] a. determining in a sample obtained from the subject the amount of at least one biomarker selected from the group consisting of Complement factor D, and Insulin-like growth factor-binding protein 1 as well as combinations thereof and isoforms, fragments and variants thereof. These biomarkers are showing an excellent quality score of 5 to 7. They are also membrane biomarkers making them particularly suitable candidates for detection in urine, blood, plasma or serum.

[0086] In an aspect, the invention relates to a method for predicting the risk of occurrence of acute kidney injury (AKI) or for early diagnosis of AKI in a subject, comprising the step of:
[0087] a. determining in a sample obtained from the subject the amount of at least one biomarker selected from the group consisting of CD9 antigen, CD15, Hyaluronan mediated motility receptor, Myeloblastin and Tetraspanin-16, as well as combinations thereof and isoforms, fragments and variants thereof. These biomarkers are showing a very high to excellent quality score of 3 to 6. They are also membrane biomarkers making them particularly suitable candidates for detection in urine, blood, plasma or serum.

[0088] In an aspect, the invention relates to a method for predicting the risk of occurrence of acute kidney injury (AKI) or for early diagnosis of AKI in a subject, comprising the step of:
[0089] a. determining in a sample obtained from the subject the amount of at least one biomarker selected from the group consisting of CD99 antigen, and CD99R antigen, as well as combinations thereof and isoforms, fragments and variants thereof. These biomarkers are showing a very high to excellent quality score of 3 to 6. They are also membrane biomarkers making them particularly suitable candidates for detection in urine, blood, plasma or serum.

[0090] In an aspect, the invention relates to a method for predicting the risk of occurrence of acute kidney injury (AKI) or for early diagnosis of AKI in a subject, comprising the step of:
[0091] a. determining in a sample obtained from the subject the amount of at least one biomarker selected from the group consisting of CD9 antigen, CD15, Cytokine receptor-like factor 2, Lamin-B1, Melanophilin, Myeloblastin, Serum amyloid P-component, Krueppel-like factor 8, Nuclear factor of activated T-cells, Rho guanine nucleotide exchange factor 2, CASP8 and FADD-like apoptosis regulator, CUE domain-containing protein 2, Death-associated protein kinase 1, Prelamin-A/C, Cytochrome P450 1B1, Adenomatous polyposis coli protein and POU domain, class 2, transcription factor 1, as well as combinations thereof and isoforms, fragments and variants thereof. These biomarkers are showing distinct kidney expression. Distinct kidney expression refers to specific abundance within kidney substructures observed by the inventors. This indicates specific renal functions of the markers making them particularly suitable as biomarkers for kidney injury.

[0092] In an aspect, the invention relates to a method for predicting the risk of occurrence of acute kidney injury (AKI) or for early diagnosis of AKI in a subject, comprising the step of:
[0093] a. determining in a sample obtained from the subject the amount of at least one biomarker selected from the group consisting of CD9 antigen, CD15 and Myeloblastin, as well as combinations thereof and isoforms, fragments and variants thereof. These biomarkers are showing a high to excellent quality score of 3 to 6. They are also showing distinct kidney expression. Distinct kidney expression refers to specific abundance within kidney substructures observed by the inventors. This indicates specific renal functions of the markers making them particularly suitable as biomarkers for kidney injury. In addition, these three proteins are expressed by leukocytes; more specifically they are located on the cell membrane or in polymorphonuclear leukocyte granules. This is of special importance as leukocytes are known to be involved in the pathogenesis of acute kidney injury as the immune response to kidney damage during AKI is an important contributor to a prolonged lack of renal function and progression of kidney injury (Kinsey & Okusa, 2012).

[0094] In an aspect, the invention relates to a method for predicting the risk of occurrence of acute kidney injury (AKI) or for early diagnosis of AKI in a subject, comprising the step of:
[0095] a. determining in a sample obtained from the subject the amount of at least one biomarker selected from the group consisting of Nuclear factor of activated T-cells, Interferon alpha-1/13 and Myeloblastin, as well as combinations thereof and isoforms, fragments and variants thereof. These biomarkers are showing a high to excellent quality score of 3 to 6.

[0096] In an aspect, the invention relates to a method for predicting the risk of occurrence of acute kidney injury (AKI) or for early diagnosis of AKI in a subject, comprising the step of:
[0097] a. determining in a sample obtained from the subject the amount of at least one biomarker selected from the group consisting of CD15, Lamin-B1, MAP/microtubule affinity-regulating kinase 4, Dickkopf-related protein 2, Krueppel-like factor 8, Rho guanine nucleotide exchange factor 2, CUE domain-containing protein 2, Death-associated protein kinase 1, DNA-binding protein inhibitor ID-2, Prelamin-A/C, Adenomatous polyposis coli protein, POU domain class 2 transcription factor 1, Somatostatin receptor type 4 and Tumor necrosis factor alpha-induced protein 3, as well as combinations thereof and isoforms, fragments and variants thereof. These biomarkers were detected as differentially abundant in male patients and are particularly useful for predicting and/or diagnosing AKI in male patients.

[0098] In an aspect, the invention relates to a method for predicting the risk of occurrence of acute kidney injury (AKI) or for early diagnosis of AKI in a subject, comprising the step of:
[0099] a. determining in a sample obtained from the subject the amount of at least one biomarker selected from the group consisting of CD15, Lamin-B1 and MAP/microtubule affinity-regulating kinase 4, as well as combinations thereof and isoforms, fragments and variants thereof. These biomarkers are showing a high to excellent quality score of 3 to 6. They were also detected as differentially abundant in male patients and are particularly useful for predicting and/or diagnosing AKI in male patients.

[0100] In an aspect, the invention relates to a method for predicting the risk of occurrence of acute kidney injury (AKI) or for early diagnosis of AKI in a subject, comprising the step of:
[0101] a. determining in a sample obtained from the subject the amount of at least one biomarker selected from the group consisting of CD9 antigen, Tetraspanin-16, as well as combinations thereof and isoforms, fragments and variants thereof. These biomarkers belong to the tetraspanin family of integral membrane proteins. They interact with a variety of proteins and other tetraspanins and are required for the normal development and function of several organs including the eye, kidney and the immune system (Charrin et al., 2014).

[0102] In an aspect, the invention relates to a method for predicting the risk of occurrence of acute kidney injury (AKI) or for early diagnosis of AKI in a subject, comprising the step of:
[0103] a. determining in a sample obtained from the subject the amount of at least one biomarker selected from the group consisting of Serum amyloid P-component, L-selectin and Galectin-4, as well as combinations thereof and isoforms, fragments and variants thereof. These biomarkers belong to the Lectin family. Lectins are specific carbohydrate binding proteins and one of their major functions is to facilitate cell-cell contacts. Selectins, for instance, are involved in leukocyte adhesion and signaling at the vascular wall being crucial steps during inflammation and immune response (McEver, 2015).

[0104] In an aspect, the invention relates to a method for predicting the risk of occurrence of acute kidney injury (AKI) or for early diagnosis of AKI in a subject, comprising the step of:
[0105] a. determining in a sample obtained from the subject the amount of at least one biomarker selected from the group consisting of MAP/microtubule affinity-regulating kinase 4, Microtubule-associated proteins 1A/1B light chain 3B, Rho guanine nucleotide exchange factor 2, Adenomatous polyposis coli protein, as well as combinations thereof and isoforms, fragments and variants thereof. These biomarkers belong to the microtubuli binding proteins. In kidney tubular epithelial cells, the microtubule cytoskeleton plays a crucial role in the maintenance of cell polarity thereby influencing renal function (Drubin & Nelson, 1996).

[0106] In an aspect, the invention relates to a method for predicting the risk of occurrence of acute kidney injury (AKI) or for early diagnosis of AKI in a subject, comprising the step of:
[0107] a. determining in a sample obtained from the subject the amount of at least one biomarker selected from the group consisting of MAP/microtubule affinity-regulating kinase 4, Mitogen-activated protein kinase 3, Serine/threonine-protein kinase VRK1, Death-associated protein kinase 1, Mitogen-activated protein kinase 12, as well as combinations thereof and isoforms, fragments and variants thereof. These biomarkers are showing protein serine/threonine kinase activity. Serine/Threonine kinases are key mediators in various signaling pathways including regulation of renal tubular transport (Satoh et al., 2015).

[0108] In an aspect, the invention relates to a method for predicting the risk of occurrence of acute kidney injury (AKI) or for early diagnosis of AKI in a subject, comprising the step of:
[0109] a. determining in a sample obtained from the subject the amount of at least one biomarker selected from the group consisting of Cyclin-dependent kinase inhibitor 3, Phosphatidylinositol 3,4,5-trisphosphate 3-phosphatase and dual-specificity protein phosphatase PTEN, as well as combinations thereof and isoforms, fragments and variants thereof. These biomarkers are showing protein-tyrosine phosphatases activity. Protein tyrosine phosphorylation and dephosphorylation signaling is crucial in podocyte function and repair (Nezvitsky et al., 2014; Hsu et al., 2017).

[0110] In an aspect, the invention relates to a method for predicting the risk of occurrence of acute kidney injury (AKI) or for early diagnosis of AKI in a subject, comprising the step of:
[0111] a. determining in a sample obtained from the subject the amount of at least one biomarker selected from the group consisting of CTP synthase 1 and CAD protein, as well as combinations thereof and isoforms, fragments and variants thereof. These biomarkers are involved in pyrimidine biosynthesis. Pyrimidines are fundamental for DNA replication, gene transcription, protein synthesis, and cellular metabolism.

[0112] In an aspect, the invention relates to a method for predicting the risk of occurrence of acute kidney injury (AKI) or for early diagnosis of AKI in a subject, comprising the step of:
[0113] a. determining in a sample obtained from the subject the amount of at least one biomarker selected from the group consisting of Cytokine receptor common subunit beta, Interferon alpha-1/13 and Cytokine receptor-like factor 2, as well as combinations thereof and isoforms, fragments and variants thereof. These biomarkers are proteins of the Jak-STAT signaling pathway. The Janus kinase/signal transducers and activators of transcription (JAK/STAT) pathway, in particular STAT1 and STAT3, was shown to be activated in renal and non-renal cells of kidney diseases, such as renal fibrosis and diabetic nephropathy (Chuang & He, 2010; Pang et al., 2010).

[0114] In an aspect, the invention relates to a method for predicting the risk of occurrence of acute kidney injury (AKI) or for early diagnosis of AKI in a subject, comprising the step of:
[0115] a. determining in a sample obtained from the subject the amount of at least one biomarker selected from the group consisting of Complement factor D, Neurotrophin-4, Insulin-like growth factor-binding protein 1, Cystatin-B, Interleukin-18-binding protein, WAP four-disulfide core domain protein 2, Haptoglobin, Uteroglobin, Chitinase-3-like protein 1, Elafin, Cartilage oligomeric matrix protein, Interleukin-16, and Inter-alpha-trypsin inhibitor heavy chain H1, as well as combinations thereof and isoforms, fragments and variants thereof.

[0116] In an aspect, the invention relates to a method for predicting the risk of occurrence of acute kidney injury (AKI) or for early diagnosis of AKI in a subject, comprising the step of:
[0117] a. determining in a sample obtained from the subject the amount of at least one biomarker selected from the group consisting of Nuclear factor of activated T-cells, CD99R antigen, Galectin 4, Prostaglandin G/H synthase 2, Insulin-like growth factor-binding protein 1, Haptoglobin, Uteroglobin as well as combinations thereof and isoforms, fragments and variants thereof. These biomarkers show a large absolute delta log FC between predictive and diagnostic status of the subject of at least 0.5, preferably of at least 1.0, which is associated with an elevated risk of developing AKI or diagnosing AKI at an early stage.

[0118] In an embodiment of the diagnostic method, further biomarkers are determined in the sample in addition to the biomarkers listed herein. The further biomarkers may be one, two, three or more biomarkers selected from the protein biomarkers, male patient biomarkers, predictive biomarkers, diagnostic biomarkers, or combined predictive and diagnostic biomarkers.

[0119] Predictive Method

[0120] The following methods are preferred predictive methods, i.e. methods used to determine the risk that the subject will develop AKI. The sets of biomarkers used in the preferred methods have shown to be particularly useful for predicting the risk of occurrence of AKI. In the following passages only step a. is indicated. Preferably, the methods also include the following step subsequent to step a.:
[0121] b. comparing the amount of the biomarker with a reference amount for the biomarker.

[0122] In an aspect, the invention relates to a method for predicting the risk of occurrence of acute kidney injury (AKI) in a subject, comprising the step of:
[0123] a. determining in a sample obtained from the subject the amount of at least one biomarker that is upregulated in connection with imminent AKI, wherein the upregulated predictive biomarker is selected from the group consisting of

[0124] Cellular tumor antigen p53, Serum amyloid P-component, Urokinase-type plasminogen activator, Keratin type II cytoskeletal 8, Homeobox protein Hox-C11, Ragulator complex protein LAMTOR1, Transforming growth factor beta-1 proprotein, High mobility group protein B2, Intercellular adhesion molecule 1, Complement decay-accelerating factor, Eukaryotic translation initiation factor 3 subunit B, Zinc finger protein 593, Endothelin-1 receptor, CASP8 and FADD-like apoptosis regulator, DNA-binding protein inhibitor ID-2, POU domain class 2 transcription factor 1, as well as combinations thereof and isoforms, fragments and variants thereof.

[0125] The listed upregulated predictive biomarkers have proven to be particularly useful for predicting the risk of occurrence of AKI. These biomarkers correspond to SEQ ID Nos. 69-77, 122, 127-128, 102-103, 145, 153, 184, 144, 146, 137-143, 223-224, 233, 218-222, 198-212, 225, and 241-246, respectively.

[0126] In an aspect, the invention relates to a method for predicting the risk of occurrence of acute kidney injury (AKI) in a subject, comprising the step of:
[0127] a. determining in a sample obtained from the subject the amount of at least one biomarker that is downregulated in connection with imminent AKI, wherein the downregulated predictive biomarker is selected from the group consisting of

[0128] CD15, CD99 antigen, CD99R antigen, Tumor necrosis factor receptor superfamily member 6, Ligands of Tumor necrosis factor receptor superfamily member 1B including Tumor necrosis factor and Lymphotoxin-alpha, High affinity immunoglobulin epsilon receptor subunit alpha, CD9 antigen, Dickkopf-related protein 2, C-C motif chemokine 7, DNA topoisomerase 2-alpha, Receptor-type tyrosine-protein phosphatase C, Major prion protein, P-selectin glycoprotein ligand 1, Interleukin-7, Basigin, Hyaluronan mediated motility receptor, Interleukin-18, Tumor necrosis factor ligand superfamily member 14, Serine/threonine-protein kinase PAK 1, Lamin-B1, Monocyte differentiation antigen CD14, Eotaxin, Caspase-8, C-C motif chemokine 3, Brain-derived neurotrophic factor, C-C motif chemokine 5, Cytokine receptor-like factor 2, Leukocyte surface antigen CD47, Leukosialin, Interstitial collagenase, Melanophilin, Myeloblastin, Dickkopf-related protein 3, MAP/microtubule affinity-regulating kinase 4, Transforming growth factor-beta-induced, protein ig-h3, Cytokine receptor common subunit beta, Prostaglandin G/H synthase 1, Growth arrest-specific protein 6, RNA-binding protein 3, T-cell surface glycoprotein CD8 alpha chain, Interleukin-15, Tetraspanin-16, Matrilysin, Interferon alpha-1/13, Nuclear factor of activated T-cells, L-selectin, Actin cytoplasmic 1, Krueppel-like factor 8, Interleukin-12 subunit alpha, Interleukin-8, Mitogen-activated protein kinase 3, Caspase-3, Galectin-4, Mucin-5B, Serine/threonine-protein kinase VRK1, Rho guanine nucleotide exchange factor 2, Prelamin-A/C, CAD protein, Death-associated protein kinase 1, CUE domain-containing protein 2, Somatostatin receptor type 4, Angiotensinogen, Adenomatous polyposis coli protein, Tumor necrosis factor alpha-induced protein 3, Neurotrophin-4, Interleukin-18-binding protein, Interleukin-16 and Inter-alpha-trypsin inhibitor heavy chain H1, as well as combinations thereof and isoforms, fragments and variants thereof.

[0129] The listed downregulated predictive biomarkers have proven to be particularly useful for predicting the risk of occurrence of AKI. These biomarkers correspond to SEQ ID Nos. 2-4, 6-12, 5, 19, 20, 18, 43-46, 31-38, 30, 39-40, 27-29, 14-17, 21-24, 25-26, 41-42, 78-79, 68, 64, 61, 52-60, 62, 47-51, 63, 65-67, 85-88, 104, 112, 107-111, 120, 92, 105-106, 84, 100-101, 114-119, 93-97, 121, 89-91, 98, 123-126, 113, 13, 160-183, 154-155, 135, 148-151, 147, 194, 156-158,136,152, 159, 185, 195-197, 226-231, 232, 214-217, 213, 247, 237, 238-240, 248, 251-252, 256-258, 266-270, 277-281, and 295-304 respectively, as well as CD15.

[0130] In an aspect, the invention relates to a method for predicting the risk of occurrence of acute kidney injury (AKI) in a subject, comprising the step of:
[0131] a. determining in a sample obtained from the subject the amount of at least one predictive biomarker selected from the group consisting of CD15 and Interferon alpha-1/13, as well as combinations thereof and isoforms, fragments and variants thereof. These biomarkers are showing an excellent quality score of 6.

[0132] In an aspect, the invention relates to a method for predicting the risk of occurrence of acute kidney injury (AKI) in a subject, comprising the step of:
[0133] a. determining in a sample obtained from the subject the amount of at least one predictive biomarker selected from the group consisting of Nuclear factor of activated T-cells and Interferon alpha-1/13, as well as combinations thereof and isoforms, fragments and variants thereof. These biomarkers are showing an excellent quality score of 5 to 6.

[0134] In an aspect, the invention relates to a method for predicting the risk of occurrence of acute kidney injury (AKI) in a subject, comprising the step of:
[0135] a. determining in a sample obtained from the subject the amount of at least one predictive biomarker selected from the group consisting of CD9 antigen, Dickkopf-related protein 2, Hyaluronan mediated motility receptor, as well as combinations thereof and isoforms, fragments and variants thereof. These biomarkers are showing an excellent quality score of 5.

[0136] In an aspect, the invention relates to a method for predicting the risk of occurrence of acute kidney injury (AKI) in a subject, comprising the step of:
[0137] a. determining in a sample obtained from the subject the amount of at least one predictive biomarker selected from the group consisting of Interferon alpha-1/13 and Neurotrophin-4, isoforms, fragments and variants thereof. These biomarkers are showing an excellent quality score of 5. In an aspect, the invention relates to a method for predicting the risk of occurrence of acute kidney injury (AKI) in a subject, comprising the step of:
[0138] a. determining in a sample obtained from the subject the amount of at least one predictive biomarker selected from the group consisting of Cytokine receptor-like factor 2 and Lamin-B1, as well as combinations thereof and isoforms, fragments and variants thereof. These biomarkers are showing a very high quality score of 4.

[0139] In an aspect, the invention relates to a method for predicting the risk of occurrence of acute kidney injury (AKI) in a subject, comprising the step of:
[0140] a. determining in a sample obtained from the subject the amount of at least one predictive biomarker selected from the group consisting of Interleukin-18-binding protein, isoforms, fragments and variants thereof. These biomarkers are showing a very high quality score of 4. In an aspect, the invention relates to a method for predicting the risk of occurrence of acute kidney injury (AKI) in a subject, comprising the step of:
[0141] a. determining in a sample obtained from the subject the amount of at least predictive biomarker selected from the group consisting of Cytokine receptor common subunit beta, Leukosialin, MAP/microtubule affinity-regulating kinase 4, Melanophilin, Myeloblastin, RNA-binding protein 3, Serum amyloid P-component and Tetraspanin-16, as well as combinations thereof and isoforms, fragments and variants thereof. These biomarkers are showing a high quality score of 3.

[0142] In an aspect, the invention relates to a method for predicting the risk of occurrence of acute kidney injury (AKI) in a subject, comprising the step of:
[0143] a. determining in a sample obtained from the subject the amount of at least predictive biomarker selected from the group consisting of CD99 antigen, CD99R antigen, CUE domain-containing protein 2 Interleukin-16, Inter-alpha-trypsin inhibitor heavy chain H1, as well as combinations thereof and isoforms, fragments and variants thereof. These biomarkers are showing a high quality score of 3.

[0144] In an aspect, the invention relates to a method for predicting the risk of occurrence of acute kidney injury (AKI) in a subject, comprising the step of:
[0145] a. determining in a sample obtained from the subject the amount of at least one predictive biomarker selected from the group consisting of Dickkopf-related protein 2 and Interferon alpha-1/13, as well as combinations thereof and isoforms, fragments and variants thereof. These biomarkers are showing an excellent quality score of 5 to 6. They are also secreted biomarkers making them particularly suitable candidates for detection in urine, blood, plasma or serum.

[0146] In an aspect, the invention relates to a method for predicting the risk of occurrence of acute kidney injury (AKI) in a subject, comprising the step of:
[0147] a. determining in a sample obtained from the subject the amount of at least one predictive biomarker selected from the group consisting of Neurotrophin-4, and Interferon alpha-1/13, as well as combinations thereof and isoforms, fragments and variants thereof. These biomarkers are showing an excellent quality score of 5 to 6. They are also secreted biomarkers making them particularly suitable candidates for detection in urine, blood, plasma or serum.

[0148] In an aspect, the invention relates to a method for predicting the risk of occurrence of acute kidney injury (AKI) in a subject, comprising the step of:
[0149] a. determining in a sample obtained from the subject the amount of at least one predictive biomarker selected from the group consisting of Dickkopf-related protein 2, Cytokine receptor-like factor 2, and Serum amyloid P-component, as well as combinations thereof and isoforms, fragments and variants thereof. These biomarkers are showing a high to excellent quality score of 3 to 6. They are also secreted biomarkers making them particularly suitable candidates for detection in urine, blood, plasma or serum.

[0150] In an aspect, the invention relates to a method for predicting the risk of occurrence of acute kidney injury (AKI) in a subject, comprising the step of:
[0151] a. determining in a sample obtained from the subject the amount of at least one predictive biomarker selected from the group consisting of CD9 antigen, CD15, Hyaluronan mediated motility receptor, as well as combinations thereof and isoforms, fragments and variants thereof. These biomarkers are showing an excellent quality score of 5 to 6. They are also membrane biomarkers making them particularly suitable candidates for detection in urine, blood, plasma or serum.

[0152] In an aspect, the invention relates to a method for predicting the risk of occurrence of acute kidney injury (AKI) in a subject, comprising the steps of:
[0153] a. determining in a sample obtained from the subject the amount of at least one predictive biomarker selected from the group consisting of CD9 antigen, CD15, Hyaluronan mediated motility receptor, Myeloblastin, Tetraspanin-16, CD99 antigen, and CD99R antigen, as well as combinations thereof and isoforms, fragments and variants thereof. These biomarkers are showing a high to excellent quality score of 3 to 6. They are also membrane biomarkers making them particularly suitable candidates for detection in urine, blood, plasma or serum.

[0154] In an aspect, the invention relates to a method for predicting the risk of occurrence of acute kidney injury (AKI) in a subject, comprising the step of:
[0155] a. determining in a sample obtained from the subject the amount of at least one predictive biomarker selected from the group consisting of CD9 antigen, CD15, Cytokine receptor-like factor 2, Lamin-B1, Melanophilin, Myeloblastin, Krueppel-like factor 8, Nuclear factor of activated T-cells, Rho guanine nucleotide exchange factor 2, CUE domain-containing protein 2, Death-associated protein kinase 1, Prelamin-A/C, Adenomatous polyposis coli protein, as well as combinations thereof and isoforms, fragments and variants thereof. These biomarkers are showing distinct kidney expression. Distinct kidney expression refers to specific abundance within kidney substructures observed by the inventors. This indicates specific renal functions of the markers making them particularly suitable as biomarkers for kidney injury.

[0156] In an aspect, the invention relates to a method for predicting the risk of occurrence of acute kidney injury (AKI) in a subject, comprising the step of:
[0157] a. determining in a sample obtained from the subject the amount of at least one predictive biomarker selected from the group consisting of CD9 antigen, CD15, Hyaluronan mediated motility receptor, as well as combinations thereof and isoforms, fragments and variants thereof. These biomarkers are showing a high to excellent quality score of 3 to 6. They are also showing distinct kidney expression. Distinct kidney expression refers to specific abundance within kidney substructures observed by the inventors. This indicates specific renal functions of the markers making them particularly suitable as biomarkers for kidney injury.

[0158] In an aspect, the invention relates to a method for predicting the risk of occurrence of acute kidney injury (AKI) in a subject, comprising the step of:
[0159] a. determining in a sample obtained from the subject the amount of at least one predictive biomarker selected from the group consisting of CD15, Lamin-B1, MAP/microtubule affinity-regulating kinase 4, Dickkopf-related protein 2, Krueppel-like factor 8, Rho guanine nucleotide exchange factor 2, Prelamin-A/C, Death-associated protein kinase 1, CUE domain-containing protein 2, Somatostatin receptor type 4, Adenomatous polyposis coli protein, DNA-binding protein inhibitor ID-2, POU domain class 2 transcription factor 1, Tumor necrosis factor alpha-induced protein 3, as well as combinations thereof and isoforms, fragments and variants thereof. These biomarkers were detected as differentially abundant in male patients and are particularly useful for predicting AKI in male patients.

[0160] In an aspect, the invention relates to a method for predicting the risk of occurrence of acute kidney injury (AKI) in a subject, comprising the step of:
[0161] a. determining in a sample obtained from the subject the amount of at least one biomarker selected from the group consisting of CD15, Lamin-B1, MAP/microtubule affinity-regulating kinase 4, as well as combinations thereof and isoforms, fragments and variants thereof. These biomarkers are showing a high to excellent quality score of 3 to 6. They were also detected as differentially abundant in male patients and are particularly useful for predicting AKI in male patients.

[0162] In an aspect, the invention relates to a method for predicting the risk of occurrence of acute kidney injury (AKI) in a subject, comprising the step of:
[0163] a. determining in a sample obtained from the subject the amount of at least one predictive biomarker selected from the group consisting of CD9 antigen, Tetraspanin-16, as well as combinations thereof and isoforms, fragments and variants thereof. These biomarkers belong to the tetraspanin family of integral membrane proteins. They interact with a variety of proteins and other tetraspanins and are required for the normal development and function of several organs including the eye, and the immune system (Charrin et al., 2014).

[0164] In an aspect, the invention relates to a method for predicting the risk of occurrence of acute kidney injury (AKI) in a subject, comprising the step of:
[0165] a. determining in a sample obtained from the subject the amount of at least one predictive biomarker selected from the group consisting of Serum amyloid P-component, L-selectin and Galectin-4, as well as combinations thereof and isoforms, fragments and variants thereof. These biomarkers belong to the Lectin family. Lectins are specific carbohydrate binding proteins and one of their major functions is to facilitate cell-cell contacts. Selectins, for instance, are involved in leukocyte adhesion and signaling at the vascular wall being crucial steps during inflammation and immune response (McEver, 2015).

[0166] In an aspect, the invention relates to a method for predicting the risk of occurrence of acute kidney injury (AKI) in a subject, comprising the step of:
[0167] a. determining in a sample obtained from the subject the amount of at least one predictive biomarker selected from the group consisting of MAP/microtubule affinity-regulating kinase 4, Rho guanine nucleotide exchange factor 2, Adenomatous polyposis coli protein, as well as combinations thereof and isoforms, fragments and variants thereof. These biomarkers belong to the microtubuli binding proteins. In kidney tubular epithelial cells, the microtubule cytoskeleton plays a crucial role in the maintenance of cell polarity thereby influencing renal function (Drubin & Nelson, 1996).

[0168] In an aspect, the invention relates to a method for predicting the risk of occurrence of acute kidney injury (AKI) in a subject, comprising the step of:
[0169] a. determining in a sample obtained from the subject the amount of at least one predictive biomarker selected from the group consisting of MAP/microtubule affinity-regulating kinase 4, Mitogen-activated protein kinase 3, Serine/threonine-protein kinase VRK1, Death-associated protein kinase 1, as well as combinations thereof and isoforms, fragments and variants thereof. These biomarkers are showing protein serine/threonine kinase activity. Serine/Threonine kinases are key mediators in various signaling pathways including regulation of renal tubular transport (Satoh et al., 2015).

[0170] In an aspect, the invention relates to a method for predicting the risk of occurrence of acute kidney injury (AKI) in a subject, comprising the step of:
[0171] a. determining in a sample obtained from the subject the amount of one predictive biomarker selected from the group of CAD protein, as well as isoforms, fragments and variants thereof. These biomarkers are involved in pyrimidine biosynthesis. Pyrimidines are fundamental for DNA replication, gene transcription, protein synthesis, and cellular metabolism.

[0172] In an aspect, the invention relates to a method for predicting the risk of occurrence of acute kidney injury (AKI) in a subject, comprising the step of:
[0173] a. determining in a sample obtained from the subject the amount of at least one predictive biomarker selected from the group consisting of Cytokine receptor common subunit beta, Interferon alpha-1/13, Cytokine receptor-like factor 2, as well as combinations thereof and isoforms, fragments and variants thereof. These biomarkers are proteins of the Jak-STAT signaling pathway. The Janus kinase/signal transducers and activators of transcription (JAK/STAT) pathway is crucial for the kidney's response to injury and the progression of several renal diseases (Chuang & He, 2010; Pang et al., 2010).

[0174] In an embodiment of the predictive method, further biomarkers are determined in the sample in addition to the biomarkers listed herein. The further biomarkers may be one, two, three or more biomarkers selected from the protein biomarkers, male patient biomarkers, predictive biomarkers, diagnostic biomarkers, or combined predictive and diagnostic biomarkers.

[0175] Diagnostic Method

[0176] The following methods are preferred diagnostic methods, the methods are used to determine whether a subject has (early stage) AKI. The sets of biomarkers used in the preferred methods have shown to be particularly useful for diagnosing AKI early. In the following passages only step a. is indicated. Preferably, the methods also include the following step subsequent to step a.:
[0177] b. comparing the amount of the biomarker with a reference amount for the biomarker.

[0178] In an aspect, the invention relates to a method for diagnosing acute kidney injury (AKI) in a subject, comprising the step of:
[0179] a. determining in a sample obtained from the subject the amount of at least one biomarker that is upregulated in connection with existing early AKI, wherein the upregulated diagnostic biomarker is selected from the group consisting of

[0180] Interferon alpha-1/13, Caspase-9, Interleukin-7, Interleukin-18, Eotaxin, Max dimerization protein 4, Interleukin-15, CTP synthase 1, Cytokine receptor-like factor 2, RNA-binding protein 3, Transmembrane protein 54, C-C motif chemokine 7, Microtubule-associated proteins 1A/1B light chain 3B, Phosphatidylinositol 3,4,5-trisphosphate 3-phosphatase and dual-specificity protein phosphatase PTEN, Caspase-8, Growth arrest-specific protein 6, Interstitial collagenase, Mitogen-activated protein kinase 12, E3 ubiquitin-protein ligase TRIM22, Galectin-4, Major prion protein, complement factor D, Insulin-like growth factor-binding protein 1, Cystatin-B, WAP four-disulfide core domain protein 2, Uteroglobin, Chitinase-3-like protein 1, Elafin and Cartilage oligomeric matrix protein, as well as combinations thereof and isoforms, fragments and variants thereof.

[0181] The listed upregulated diagnostic biomarkers have proven to be particularly useful for early diagnosis of AKI. These biomarkers correspond to SEQ ID Nos. (13, 80-83, 27-29, 25-26, 61, 131, 98-99, 129-130, 65-67, 121, 132-134, 18, 190, 191-193, 52-60, 93-97, 112, 234-235, and 249-250, 253-255, 259-265, 266-270, 271-294, respectively).

[0182] In an aspect, the invention relates to a method for diagnosing acute kidney injury (AKI) in a subject, comprising the step of:
[0183] a. determining in a sample obtained from the subject the amount of at least one biomarker that is downregulated in connection with existing early AKI, wherein the downregulated diagnostic biomarker is selected from the group consisting of

[0184] Prostaglandin G/H synthase 2, CD139, Cyclin-dependent kinase inhibitor 3, Tissue factor pathway inhibitor 2, Krueppel-like factor 8, and Cytochrome P450 1B1 as well as combinations thereof and isoforms, fragments and variants thereof.

[0185] The listed downregulated diagnostic biomarkers have proven to be particularly useful for early diagnosis of AKI. These biomarkers correspond to SEQ ID Nos. 1, 148-151, 186, 188-189, and 236, respectively, as well as CD139.

[0186] In an aspect, the invention relates to a method for diagnosing acute kidney injury (AKI) in a subject, comprising the step of:
[0187] a. determining in a sample obtained from the subject the amount of at least one biomarker that is downregulated in connection with existing early AKI, wherein the downregulated diagnostic biomarker is selected from the group consisting of Complement factor D, Insulin-like growth factor-binding protein 1, Interleukin-18-binding protein and Haptoglobin as well as combinations thereof and isoforms, fragments and variants thereof.

[0188] The listed downregulated diagnostic biomarkers have proven to be particularly useful for early diagnosis of AKI. These biomarkers correspond to SEQ ID Nos. 253-255, 259-262, 266-270, 277-281 respectively, as well as CD139.

[0189] In an aspect, the invention relates to a method for early diagnosis of AKI in a subject, comprising the step of:
[0190] a. determining in a sample obtained from the subject the amount of one diagnostic biomarker selected from the group of Interferon alpha-1/13, isoforms, fragments and/or variants thereof. These biomarkers are showing an excellent quality score of 6.

[0191] In an aspect, the invention relates to a method for early diagnosis of AKI in a subject, comprising the step of:
[0192] a. determining in a sample obtained from the subject the amount of one diagnostic biomarker selected from the group of Complement factor D, Insulin-like growth factor-binding protein 1 and Haptoglobin, isoforms, fragments and/or variants thereof. These biomarkers are showing an excellent quality score of 6 or higher.

[0193] In an aspect, the invention relates to a method for early diagnosis of AKI in a subject, comprising the steps of:
[0194] a. determining in a sample obtained from the subject the amount of one diagnostic biomarker selected from the group of Cytokine receptor-like factor 2, isoforms, fragments and/or variants thereof. These biomarkers are showing a very high quality score of 4.

[0195] In an aspect, the invention relates to a method for early diagnosis of AKI in a subject, comprising the steps of:
[0196] a. determining in a sample obtained from the subject the amount of one diagnostic biomarker selected from the group of Interferon alpha-1/13, Cystatin-B, Interleukin-18-binding protein, WAP four-disulfide core domain protein 2, Uteroglobin, Chitinase-3-like protein 1, Elafin, Cartilage oligomeric matrix protein, isoforms, fragments and/or variants thereof. These biomarkers are showing a very high quality score of 4 or 5. In an aspect, the invention relates to a method for early diagnosis of AKI in a subject, comprising the step of:
[0197] a. determining in a sample obtained from the subject the amount of one diagnostic biomarker selected from the group of RNA-binding protein 3, isoforms, fragments and/or variants thereof.

[0198] These biomarkers are showing a high quality score of 3.

[0199] In an aspect, the invention relates to a method for early diagnosis of AKI in a subject, comprising the step of:
[0200] a. determining in a sample obtained from the subject the amount of one diagnostic biomarker selected from the group consisting of Interferon alpha-1/13, as well as combinations thereof and isoforms, fragments and/or variants thereof. These biomarkers are showing an excellent quality score of 5 to 6. They are also secreted biomarkers making them particularly suitable candidates for detection in urine, blood, plasma or serum.

[0201] In an aspect, the invention relates to a method for early diagnosis of AKI in a subject, comprising the step of:
[0202] a. determining in a sample obtained from the subject the amount of at least one diagnostic biomarker selected from the group consisting of Cytokine receptor-like factor 2, as well as isoforms, fragments and variants thereof. These biomarkers are showing a high to excellent quality score of 5 to 6. They are also secreted biomarkers making them particularly suitable candidates for detection in urine, blood, plasma or serum.

[0203] In an aspect, the invention relates to a method for early diagnosis of AKI in a subject, comprising the step of:
[0204] a. determining in a sample obtained from the subject the amount of at least one diagnostic biomarker selected from the group consisting of Cytokine receptor-like factor 2, Krueppel-like factor 8, Cytochrome P450 1B1, as well as combinations thereof and isoforms, fragments and variants thereof. These biomarkers are showing distinct kidney expression. Distinct kidney expression refers to specific abundance within kidney substructures observed by the inventors. This indicates specific renal functions of the markers making them particularly suitable as biomarkers for kidney injury.

[0205] In an aspect, the invention relates to a method for early diagnosis of AKI in a subject, comprising the step of:
[0206] a. determining in a sample obtained from the subject the amount of at least one diagnostic biomarker selected from the group consisting of Krueppel-like factor 8 and Galectin-4, as well as isoforms, fragments and variants thereof. These biomarkers were detected as differentially abundant in male patients and are particularly useful for diagnosing AKI in male patients.

[0207] In an aspect, the invention relates to a method for early diagnosis of AKI in a subject, comprising the step of:
[0208] a. determining in a sample obtained from the subject the amount of at least one diagnostic biomarker selected from the group consisting of Microtubule-associated proteins 1A/1B light chain 3B, as well as combinations thereof and fragments and variants thereof. These biomarkers belong to the microtubuli binding proteins. In kidney tubular epithelial cells, the microtubule cytoskeleton plays a crucial role in the maintenance of cell polarity thereby influencing renal function (Drubin & Nelson, 1996).

[0209] In an aspect, the invention relates to a method for early diagnosis of AKI in a subject, comprising the step of:
[0210] a. determining in a sample obtained from the subject the amount of at least one diagnostic biomarker selected from the group consisting of Mitogen-activated protein kinase 12, as well as fragments and variants thereof. These biomarkers are showing protein serine/threonine kinase activity.

[0211] Serine/Threonine kinases are key mediators in various signaling pathways including regulation of renal tubular transport (Satoh et al., 2015).

[0212] In an aspect, the invention relates to a method for early diagnosis of AKI in a subject, comprising the step of:
[0213] a. determining in a sample obtained from the subject the amount of at least one diagnostic biomarker selected from the group consisting of Cyclin-dependent kinase inhibitor 3, Phosphatidylinositol 3,4,5-trisphosphate 3-phosphatase and dual-specificity protein phosphatase PTEN, as well as combinations thereof and isoforms, fragments and variants thereof. These biomarkers are showing protein-tyrosine phosphatases activity. Protein tyrosine phosphorylation and dephosphorylation signaling is crucial in podocyte function and repair (Nezvitsky et al. 2014; Hsu et al. 2017).

[0214] In an aspect, the invention relates to a method for early diagnosis of AKI in a subject, comprising the step of:
[0215] a. determining in a sample obtained from the subject the amount of at least one diagnostic biomarker selected from the group consisting of CTP synthase 1, as well as fragments and variants thereof. These biomarkers are involved in pyrimidine biosynthesis. Pyrimidines are fundamental for DNA replication, gene transcription, protein synthesis, and cellular metabolism.

[0216] In an aspect, the invention relates to a method for early diagnosis of AKI in a subject, comprising the step of:
[0217] a. determining in a sample obtained from the subject the amount of at least one diagnostic biomarker selected from the group consisting of Cytokine receptor common subunit beta, Interferon alpha-1/13, Cytokine receptor-like factor 2, as well as combinations thereof and isoforms, fragments and variants thereof. These biomarkers are proteins of the Jak-STAT signaling pathway. The Janus kinase/signal transducers and activators of transcription (JAK/STAT) pathway is crucial for the kidney's response to injury and the progression of several renal diseases (Chuang & He, 2010; Pang et al., 2010)

[0218] In an embodiment of the diagnostic method, further biomarkers are determined in the sample in addition to the biomarkers listed herein. The further biomarkers may be one, two, three or more biomarkers selected from the protein biomarkers, male patient biomarkers, predictive biomarkers, diagnostic biomarkers, or combined predictive and diagnostic biomarkers.

[0219] Preferred Groups of Biomarkers

[0220] The biomarkers as used herein include a polypeptide according to SEQ ID No. 1 to 304 or fragments or variants of such polypeptides being associated with the risk of occurrence or to the occurrence of AKI. “Polypeptide” and “protein” are used interchangeably herein. In the tables, all protein biomarkers are uniquely described by the Uniprot entry name, the Uniprot accession number as well as the respective gene name and official protein name as provided by the Uniprot database. For more information on the protein, see the UniProt Database, in particular, the UniProt release 2019_02 of Feb. 13, 2019, see also The UniProt Consortium (2017). The sequences of all protein biomarkers of the invention are listed in the sequence listing under SEQ ID No. 1 to 304.

[0221] Variants and/or isoforms of the biomarkers disclosed herein include polypeptides which differ in their amino acid sequences, e.g. due to the presence of conservative amino acid substitutions. Preferably, such variants and/or isoforms have an amino acid sequence being at least 70%, at least 80%, at least 90%, at least 95%, at least 98%, or at least 99% identical over the entire sequence region to the amino acid sequences of the aforementioned specific polypeptides given in the sequence listing. Variants may be allelic variants, splice variants or any other species specific homologs, paralogs, or orthologs. Preferably, the percent identity can be determined by the algorithms of Needleman and Wunsch or Smith and Waterman. Programs and algorithms to carry out sequence alignments are well known by a skilled artisan. To carry out the sequence alignments, the program PileUp (Feng & Doolittle, 1987; Higgins & Sharp, 1989) or the programs Gap and BestFit (Needleman & Wunsch, 1970; Smith & Waterman, 1981), which are part of the GCG software packet (Genetics Computer Group, 575 Science Drive, Madison, Wis., USA 53711, Version 1991), may be used. The sequence identity values recited above in percent (%) may be determined using the program GAP over the entire sequence region with the following settings: Gap Weight: 50, Length Weight: 3, Average Match: 10.000 and Average Mismatch: 0.000, which, unless otherwise specified, shall always be used as standard settings for sequence alignments. In an embodiment, the variants of biomarkers include any isoforms of the respective biomarker.

[0222] The biomarkers of the present invention include protein biomarkers and non-protein biomarkers. Thus, not all of the 92 biomarkers of the present invention are proteins. The invention also includes non-protein biomarkers, namely CD15 and CD139.

[0223] In an aspect, the invention relates to a method for early diagnosis of AKI in a subject, comprising the step of:
[0224] a. determining in a sample obtained from the subject the amount of at least one protein biomarker, male patient biomarker, predictive biomarker, diagnostic biomarker, or combined predictive and diagnostic biomarker, as well as combinations thereof and fragments and variants thereof, and
[0225] b. comparing the amount of the biomarker with a reference amount for the biomarker.

[0226] The “protein biomarkers” of the present invention are CD9 antigen, Prostaglandin G/H synthase 2, CD99 antigen, CD99R antigen, High affinity immunoglobulin epsilon receptor subunit alpha, ligands of Tumor necrosis factor receptor superfamily member 1B including Tumor necrosis factor and Lymphotoxin-alpha, Tumor necrosis factor receptor superfamily member 6, Interferon alpha-1/13, Basigin, C-C motif, chemokine 7, Dickkopf-related protein 2, Hyaluronan mediated motility receptor, Interleukin-18, Interleukin-7, Major prion protein, Receptor-type tyrosine-protein phosphatase C, P-selectin glycoprotein ligand 1, Tumor necrosis factor ligand superfamily member 14, DNA topoisomerase 2-alpha, Brain-derived neurotrophic factor, Caspase-8, Eotaxin, C-C motif chemokine 3, C-C motif chemokine 5, Monocyte differentiation antigen CD14, Cytokine receptor-like factor 2, Lamin-B1, Cellular tumor antigen p53, Serine/threonine-protein kinase PAK 1, Caspase-9, Transforming growth factor-beta-induced protein ig-h3, Leukocyte surface antigen CD47, T-cell surface glycoprotein CD8 alpha chain, Dickkopf-related protein 3, Growth arrest-specific protein 6, Interleukin-15, Cytokine receptor common subunit beta, Keratin, type II cytoskeletal 8, Leukosialin, MAP/microtubule affinity-regulating kinase 4, Melanophilin, Interstitial collagenase, Matrilysin, Prostaglandin G/H synthase 1, Myeloblastin, RNA-binding protein 3, Serum amyloid P-component, Tetraspanin-16, Urokinase-type plasminogen activator, CTP synthase 1, Max dimerization protein 4, Transmembrane protein 54, Actin, cytoplasmic 1, Caspase-3, Complement decay-accelerating factor, High mobility group protein B2, Homeobox protein, Hox-C11, Intercellular adhesion molecule 1, Interleukin-12 subunit alpha, Krueppel-like factor 8, Galectin-4, Ragulator complex protein LAMTOR1, L-selectin, Mitogen-activated protein kinase 3, Mucin-5B, Nuclear factor of activated T-cells, Transforming growth factor beta-1 proprotein, Serine/threonine-protein kinase VRK1, Cyclin-dependent kinase inhibitor 3, Tissue factor pathway inhibitor 2, Microtubule-associated proteins 1A/1B light chain 3B, Phosphatidylinositol 3,4,5-trisphosphate 3-phosphatase and dual-specificity protein phosphatase PTEN, Interleukin-8, Rho guanine nucleotide exchange factor 2, CASP8 and FADD-like apoptosis regulator, CUE domain-containing protein 2, Death-associated protein kinase 1, Endothelin-1 receptor, Eukaryotic translation initiation factor 3 subunit B, DNA-binding protein inhibitor ID-2, Prelamin-A/C, CAD protein, Zinc finger protein 593, Mitogen-activated protein kinase 12, Cytochrome P450 1B1, Angiotensinogen, Adenomatous polyposis coli protein, POU domain class 2 transcription factor 1, Somatostatin receptor type 4, Tumor necrosis factor alpha-induced protein 3, E3 ubiquitin-protein ligase TRIM22, Complement factor D, Neurotrophin-4, Insulin-like growth factor-binding protein 1, Cystatin-B, Interleukin-18-binding protein, WAP four-disulfide core domain protein 2, Haptoglobin, Uteroglobin, Chitinase-3-like protein 1, Elafin, Cartilage oligomeric matrix protein, Interleukin-16 and Inter-alpha-trypsin inhibitor heavy chain H1, as well as isoforms thereof.

[0227] “Male patient biomarkers” of the present invention are CD15, ligands of Tumor necrosis factor receptor superfamily member 1B including Tumor necrosis factor and Lymphotoxin-alpha, Lamin-B1, MAP/microtubule affinity-regulating kinase 4, Dickkopf-related protein 2, Krueppel-like factor 8, Rho guanine nucleotide exchange factor 2, CUE domain-containing protein 2, Death-associated protein kinase 1, DNA-binding protein inhibitor ID-2, Prelamin-A/C, Adenomatous polyposis coli protein, POU domain class 2 transcription factor 1, Somatostatin receptor type 4, Tumor necrosis factor alpha-induced protein 3, CD99R antigen and Galectin-4 as well as isoforms thereof. The male patient biomarkers are particularly useful for predicting the risk of occurrence of AKI and for early diagnosis of AKI, respectively, in male subjects. Thus, in an embodiment of this invention the method includes determining an amount of at least one biomarker selected from SEQ ID No. 68, 105, 106, 20, 148, 149, 150, 151, 152, 195, 196, 197, 213, 214, 215, 216, 217, 225, 226, 227, 228, 229, 230, 231, 238, 239, 240, 241, 242, 243, 244, 245, 246, 247, 248 as well as CD15, or fragments or variants thereof, in a sample from a male subject, and comparing the amount of said at least one biomarker with a reference amount for said at least one biomarker. The reference amount should preferably be determined in male subjects.

[0228] “Female patient biomarker” of the present invention is Major prion protein (SEQ ID No. 30). The female patient biomarker is particularly useful for predicting the risk of occurrence of AKI and for early diagnosis of AKI, respectively, in female subjects. Thus, in an embodiment of this invention the method includes determining an amount of biomarker SEQ ID No. 30 or fragments or variants thereof, in a sample from a female subject, and comparing the amount of said at least one biomarker with a reference amount for said at least one biomarker. The reference amount should preferably be determined in female subjects.

[0229] “Predictive biomarkers” of this invention are CD15, CD99 antigen, CD99R antigen, High affinity immunoglobulin epsilon receptor subunit alpha, Ligands of Tumor necrosis factor receptor superfamily member 1B including Tumor necrosis factor and Lymphotoxin-alpha, Tumor necrosis factor receptor superfamily member 6, Basigin, C-C motif chemokine 7, CD9 antigen, Dickkopf-related protein 2, Hyaluronan mediated motility receptor, Interleukin-18, Interleukin-7, Major prion protein, Receptor-type tyrosine-protein phosphatase C, P-selectin glycoprotein ligand 1, Tumor necrosis factor ligand superfamily member 14, DNA topoisomerase 2-alpha, Brain-derived neurotrophic factor, Caspase-8, Eotaxin, C-C motif chemokine 3, C-C motif chemokine 5, Monocyte differentiation antigen CD14, Cytokine receptor-like factor 2, Lamin-B1, Cellular tumor antigen p53, Serine/threonine-protein kinase PAK 1, Transforming growth factor-beta-induced protein ig-h3, Leukocyte surface antigen CD47, T-cell surface glycoprotein CD8 alpha chain, Dickkopf-related protein 3, Growth arrest-specific protein 6, Interferon alpha-1/13, Interleukin-15, Cytokine receptor common subunit beta, Keratin type II cytoskeletal 8, Leukosialin, MAP/microtubule affinity-regulating kinase 4, Melanophilin, Interstitial collagenase, Matrilysin, Prostaglandin G/H synthase 1, Myeloblastin, RNA-binding protein 3, Serum amyloid P-component, Tetraspanin-16, Urokinase-type plasminogen activator, Actin cytoplasmic 1, Caspase-3, Complement decay-accelerating factor, High mobility group protein B2, Homeobox protein Hox-C11, Intercellular adhesion molecule 1, Interleukin-12 subunit alpha, Interleukin-8, Krueppel-like factor 8, Galectin-4, Ragulator complex protein, LAMTOR1, L-selectin, Mitogen-activated protein kinase 3, Mucin-5B, Nuclear factor of activated T-cells cytoplasmic 4, Transforming growth factor beta-1 proprotein, Serine/threonine-protein kinase VRK1, Rho guanine nucleotide exchange factor, CASP8 and FADD-like apoptosis regulator, CUE domain-containing protein 2, Death-associated protein kinase 1, Endothelin-1 receptor, Eukaryotic translation initiation factor 3 subunit, DNA-binding protein inhibitor ID-2, Prelamin-A/C, CAD protein, Zinc finger protein 593, Angiotensinogen, Adenomatous polyposis coli protein, POU domain, class 2, transcription factor 1, Somatostatin receptor type 4, Tumor necrosis factor alpha-induced protein 3 as well as isoforms thereof, Neurotrophin-4, Interleukin-18-binding protein, Interleukin-16 and Inter-alpha-trypsin inhibitor heavy chain H1 (corresponding to SEQ ID No. 2-79, 84-97, 98-128, 135-185, 194-233, 237-248, 251-252, 256-258, 266-270, 295-304 as well as CD15). It was found that these biomarkers are particularly useful for predicting AKI in a subject. The sample may be taken prior to a planned surgical intervention. Even more preferred, the predictive biomarker is selected from the group consisting of CD9 antigen, CD15, Myeloblastin, or fragments or variants thereof. More preferably, the biomarker is CD9 antigen having a sequence of SEQ ID No.19.

[0230] “Diagnostic biomarkers” of this invention are Cytokine receptor-like factor 2, Prostaglandin G/H synthase 2, Interferon alpha-1/13, Caspase-9, Interleukin-18, Interleukin-7, CTP synthase 1, C-C motif chemokine 7, CD139, Eotaxin, Max dimerization protein 4, Interleukin-15, RNA-binding protein 3, Transmembrane protein 54, Krueppel-like factor 8, Interstitial collagenase, Cyclin-dependent kinase inhibitor 3, Tissue factor pathway inhibitor 2, Growth arrest-specific protein 6, Microtubule-associated proteins 1A/1B light chain 3B, Caspase-8, Phosphatidylinositol 3,4,5-trisphosphate 3-phosphatase and dual-specificity protein phosphatase PTEN, Mitogen-activated protein kinase 12, Cytochrome P450 1B1, E3 ubiquitin-protein ligase TRIM22, Galectin-4, Major prion protein, Complement factor D, Insulin-like growth factor-binding protein 1, Cystatin-B, Interleukin-18-binding protein, WAP four-disulfide core domain protein 2, Haptoglobin, Uteroglobin, Chitinase-3-like protein 1, Elafin and Cartilage oligomeric matrix protein as well as isoforms thereof (corresponding to SEQ ID No.1, 13, 30, 80-83, 25-29, 129, 130, 18, 61-67, 131, 98, 99, 121, 132-134, 148-15, 112, 152, 186-189, 93-97, 190, 52-60, 191-193, 234-250, 253-255, 259-265, 266-270, 271-294, as well as CD139). It was found that these biomarkers are particularly useful for early diagnosis of AKI in a subject. The sample may be taken within 24 hours, 36 hours or 48 hours after surgical intervention.

[0231] “Combined predictive and diagnostic biomarkers” of this invention are Cytokine receptor-like factor 2, Caspase-8, Eotaxin, C-C motif chemokine 7, Growth arrest-specific protein 6, Interferon alpha-1/13, Interleukin-15, Interleukin-18, Interleukin-7, Krueppel-like factor 8, Interstitial collagenase, and RNA-binding protein 3, Interleukin-18-binding protein, as well as isoforms thereof (corresponding to SEQ ID No. 52-61, 18, 65-67, 93-97, 13, 98, 99, 25-29, 148-151, 112, 121, 267-269). It was found that these biomarkers are particularly useful for both predicting the risk of occurrence of AKI in a subject and early diagnosis of AKI.

[0232] Furthermore, in the context of the present invention, it is particularly envisaged to determine the amount of more than one biomarker, e.g., for predicting the risk of occurrence of AKI or for early diagnosis of AKI. The combined determination of biomarkers is advantageous since it allows for a higher specificity and sensitivity, e.g., when predicting the risk of occurrence of AKI or when diagnosing AKI timely.

[0233] The following combinations of biomarkers are particularly preferred in accordance with the methods, kits, devices, and uses of the present invention. Hence, in preferred embodiments, the invention includes determining in a sample obtained from the subject at least the amount of (optionally including fragments, variants and/or isoforms thereof):
[0234] A) CD9 and CD15,
[0235] B) CD9 antigen, CD15 and Myeloblastin,
[0236] C) CD9 antigen, CD15 and Dickkopf-related protein 2,
[0237] D) CD15 and Dickkopf-related protein 2,
[0238] E) CD15 and Interstitial collagenase,
[0239] F) CD15 and Cytokine receptor-like factor 2,
[0240] G) CD15, Dickkopf-related protein 2 and CD99 antigen (alternatively CD99R antigen),
[0241] H) CD15, Dickkopf-related protein 2 and Dickkopf-related protein 3,
[0242] 1) Cytokine receptor-like factor 2 and Dickkopf-related protein 2,
[0243] J) Dickkopf-related protein 2 and Interstitial collagenase,
[0244] K) CD15, Dickkopf-related protein 2 and Cytokine receptor-like factor 2, or
[0245] L) CD99 antigen, CD15, Myeloblastin, Dickkopf-related protein 2 and Cytokine receptor-like factor 2;
[0246] M) Nuclear factor of activated T-cells, Interferon alpha-1/13 and Myeloblastin;
[0247] N) Nuclear factor of activated T-cells and Interferon alpha-1/13;
[0248] O) Interferon alpha-1/13, CD99R antigen, Myeloblastin and Nuclear factor of activated T-cells;
[0249] P) Myeloblastin and Nuclear factor of activated T-cells;
[0250] Q) Complement factor D, Neurotrophin-4, Insulin-like growth factor-binding protein 1, Cystatin-B, Interleukin-18-binding protein and WAP four-disulfide core domain protein 2.

[0251] A combination of the aforementioned markers will increase sensitivity and specificity of the method.

[0252] In an embodiment, further biomarkers are determined in the sample in addition to the combinations given under A) to Q) above. The further biomarkers may be one or more biomarkers selected from the protein biomarkers, male patient biomarkers, predictive biomarkers, diagnostic biomarkers, or combined predictive and diagnostic biomarkers.

[0253] Method Steps

[0254] The method of the present invention may essentially consist of the aforementioned steps
[0255] a. determining in a sample obtained from the subject the amount of at least one of the biomarkers of this invention, as well as combinations thereof and fragments, isoforms and variants thereof, and
[0256] b. comparing the amount of the biomarker with a reference amount for the biomarker.

[0257] The method may include further steps. In a preferred embodiment, the method is carried out ex vivo, i.e. not practiced on the human or animal body. The method can be assisted by automation.

[0258] In accordance with the method of the present invention, the risk of occurrence of AKI is predicted or AKI is diagnosed early in a subject. Preferably, AKI is predicted or diagnosed in the context of a medical intervention, which means that the method is carried out in the peri-operative setting. In the case of a surgical intervention, the “peri-operative setting” is the period between the admission of a subject at the hospital or ICU and the complete regeneration of the subject upon surgery, e.g. the subject's release from the hospital. Using the method of this invention, it can be predicted whether AKI will occur within 1 day, 2 days, 3 days, 4 days, 5 days, 6 days, 1 week, 10 days or 2 weeks or any intermittent time range after medical intervention.

[0259] The term “medical intervention” includes “surgical interventions” and other interventions. The other interventions may include the administration of drugs, including contrast agents or kidney stabilizing agents. Other interventions may also include avoiding administration of drugs including nephrotoxic substances.

### Definitions

[0260] The term ‘solid organ’ as used herein refers to an inner organ of the body, which has a firm tissue consistency and is neither hollow nor liquid. Heart, kidney, liver, lung, ovaries, spleen and pancreas are solid organs per definition.

[0261] The term ‘solid organ transplantation’ as used herein refers to a surgical intervention during which a solid organ is removed from the body of a subject to be placed into the body of a recipient subject in order to replace a missing or a damaged organ.

[0262] The term ‘hematopoietic cell’ as used herein refers to blood cells. Hematopoietic cells encompass hematopoietic stem cells, progenitor cells and different blood cell types.

[0263] The term ‘hematopoeitic cell transplantation’ as used herein refers to a surgical intervention during which hematopoietic cells usually derived from bone marrow, peripheral blood or umbilical cord blood are transplanted.

[0264] “Predicting the risk of occurrence of AKI” may include assessing the probability prior to a medical intervention according to which AKI will occur in a subject within the period after the medical intervention. More preferably, the risk/probability of occurrence of AKI within up to two weeks after completion of the medical intervention is predicted (“predictive window”). In a preferred embodiment, the predictive window is an interval of at least 1 day, at least 2 days, at least 3 days, at least 4 days, at least 5 days, at least 6 days, at least 1 week, at least 10 days, or at least 2 weeks, or any intermittent time range. In a particular preferred embodiment of the present invention, the predictive window, preferably, is an interval of up to 10 days, or more preferably, of up to 4 weeks. The predictive window may range until about 2 years after completion of the medical intervention, or until further medical intervention. Preferably, said predictive window is calculated from the completion of the medical intervention.

[0265] The term ‘completion of the medical intervention’ as used herein refers to a time point where the medical intervention is finished, e.g. release of the subject from the hospital. The medical intervention does not end with a release of the subject from the hospital in case medical treatment of the subject is needed beyond the time of release from the hospital. Alternatively, said predictive window is calculated from the time point at which the sample to be tested has been obtained.

[0266] As will be understood by those skilled in the art, such a prediction cannot be correct for 100% of the subjects. The term, however, requires that prediction can be made for a statistically significant portion of subjects in a proper and correct manner. Whether a portion is statistically significant can be determined by the person skilled in the art using various well-known statistic evaluation tools, e.g., determination of confidence intervals, p-value determination, Student's t-test, Mann-Whitney test etc. Details are found in Dowdy and Wearden, Statistics for Research, John Wiley & Sons, New York 1983. Preferred confidence intervals are at least 90%, at least 95%, at least 97%, at least 98%, or at least 99%. The p-values are, preferably, less than 0.1, less than 0.05, less than 0.01, less than 0.005, or less than 0.0001. Preferably, the probability envisaged by the present invention allows that the prediction of an increased, normal or decreased risk will be correct for at least 60%, at least 70%, at least 80%, or at least 90% of the subjects of a given cohort or population. The term, preferably, relates to predicting whether a subject is at elevated risk or reduced risk as compared to the average risk for the occurrence of AKI in a population of subjects.

[0267] Predicting the risk of occurrence of AKI as used herein may include that the subject to be analyzed by the method of the present invention is allocated either into the group of subjects being at risk of occurrence of AKI, or into the group of subjects being not at risk of occurrence of AKI. A risk of occurrence of AKI as referred to in accordance with the present invention means that the risk of occurrence of AKI is elevated (within the predictive window). Particularly, said risk may be elevated as compared to the average risk in a cohort of subjects undergoing medical intervention. A subject is considered not at risk of occurrence of AKI, if the risk of occurrence of AKI is reduced (within the predictive window). Particularly, said risk may be reduced as compared to the average risk in a cohort of subjects undergoing a medical intervention. A subject who is at risk of occurrence of AKI may have a risk of occurrence of AKI of 90% or larger, or of 75% or larger, particularly within a predictive window of 4 weeks. A subject who is not at risk of occurrence of AKI may have a risk of occurrence of AKI of lower than 50%, or lower than 10%, particularly within a predictive window of 4 weeks.

[0268] In an embodiment, “predicting the risk of occurrence of AKI” includes comparing the amount of at least one upregulated biomarker in a sample from a subject with a reference amount, wherein a subject is considered to be at risk of developing AKI, if the reference amount is exceeded in the sample. In an embodiment, “predicting the risk of occurrence of AKI” includes comparing the amount of at least one downregulated biomarker in a sample from a subject with a reference amount, wherein a subject is considered to be at risk of developing AKI, if the amount in the sample is less than the reference amount.

[0269] The term ‘early diagnosis’ as used herein refers to a timely diagnosis of AKI after intervention. More preferably, AKI should be diagnosed within 24 h after intervention.

[0270] The term “subject” as used herein relates to animals, preferably mammals, and, more preferably, humans. In an embodiment, the subjects are male subjects. The subject to be tested may undergo or may have undergone medical intervention. Preferably, the method is applied to a subject known to undergo surgical intervention. In an embodiment, the subject will undergo surgical intervention in the future, or has undergone surgical intervention at the time at which the sample is taken. For example, the subject may have undergone medical intervention 48 h, 24 h or less before the sample is obtained. In another embodiment, the sample is taken from a subject who will undergo medical intervention, e.g. within 48, or 24 hours.

[0271] Preferred Methods

[0272] In the method according to the present invention, at least one biomarker of the afore-mentioned group of biomarkers, and preferably of the proteins as shown in SEQ ID NOs: 1 to 304, or fragments or variants thereof, is determined. However, more preferably, a group of biomarkers will be determined in order to strengthen specificity and/or sensitivity of the assessment. Such a group, preferably, comprises at least 2, at least 3, at least 4, at least 5, at least 6, at least 7, at least 8, at least 9, at least 10 or up to all of the said biomarkers. In addition to the specific biomarkers recited in the specification, other biomarkers may be, preferably, determined as well in the methods of the present invention.

[0273] In a preferred embodiment of the method of the invention, said at least one biomarker is selected from the group of biomarkers of SEQ ID No. 1 to 304 as well as CD15 and CD139, or fragments or variants thereof.

[0274] In a preferred embodiment of the method of the invention, said at least one biomarker is selected from the group of biomarkers listed in SEQ ID No. 68, 105, 106, 20, 148, 149, 150, 151, 195, 196, 197, 213, 214, 215, 216, 217, 225, 226, 227, 228, 229, 230, 231, 238, 239, 240, 241, 242, 243, 244, 245, 246, 247, 248 as well as CD15, or fragments or variants thereof. A change in such a biomarker in a sample of a male test subject as compared to the reference is indicative for the risk of occurrence of AKI.

[0275] In a preferred embodiment of the method of the invention, said at least one biomarker is selected from the group of biomarkers listed in SEQ ID No. 68, 105, 106, 20, 148, 149, 150, 151, 195, 196, 197, 213, 214, 215, 216, 217, 225, 226, 227, 228, 229, 230, 231, 238, 239, 240, 241, 242, 243, 244, 245, 246, 247, 248 as well as CD15, or fragments or variants thereof. A change in such a biomarker in a sample of a male test subject as compared to the reference is indicative for the occurrence of AKI at an early time point.

[0276] The term ‘medical intervention’ as used herein refers to a medical action taken to analyze or improve the state of a subject potentially with a medical disorder. In the context of the present invention, an intervention can be the administration of a drug, avoiding a drug, the injection of contrast media or a surgical intervention.

[0277] The term ‘change of therapy plan’ as used herein refers to an adaptation of the patient's care in response to a prognosis or a diagnosis of AKI. Adaptation of the patient's care can consist in renal dialysis, avoiding nephrotoxic compounds, administration of kidney-stabilizing drugs, avoiding allogeneic blood transfusion, optimizing of the surgery strategy, stringent observation of the patient leading to earlier intervention.

[0278] The sample may be a sample of a body fluid, to a sample of separated cells, or to a sample from a tissue or an organ. Samples of body fluids can be obtained by well-known techniques and include, preferably, samples of urine or more preferably, samples of blood, plasma, or serum. Tissue or organ samples may be obtained from any tissue. Separated cells may be obtained from the body fluids or the tissues or organs by separating techniques such as centrifugation or cell sorting. Preferably, cell-, tissue- or organ samples are obtained from those cells, tissues or organs that express or produce the biomarkers referred to herein.

[0279] For the present invention, it is particularly preferred that the sample is plasma or serum obtained from the patient. More preferably, said sample is blood plasma obtained prior to surgical intervention for predicting the risk of AKI or up to 48 h, or up to 24 h upon medical intervention for early diagnosis of AKI.

[0280] The term ‘blood product’ as used herein refers to any therapeutic substance prepared from human blood. This includes blood components and plasma derivatives. For the present invention, red blood cells and fresh frozen plasma were considered for the analysis.

[0281] Analyzing Samples

[0282] In an embodiment, the predictive method is used to determine before a medical intervention whether a subject may undergo medical intervention, and/or whether certain measures have to be taken prior or during the intervention to reduce the risk of AKI. For that purpose, the sample may be taken up to 6 months prior to a planned medical intervention.

[0283] The sample to be analyzed in the context of the methods of the present invention may be obtained prior or after a medical intervention, in particular prior or after the surgical intervention as described herein. A sample obtained prior to medical intervention is, preferably, obtained directly prior to the intervention. It is also contemplated to obtain a sample not more than six months, not more than three months, not more than six weeks, not more than two weeks, or not more than one week prior to medical intervention or at any time point prior medical intervention, such as within 2 h, 6 h, 12 h, 24 h, 36 h, 48 h, within 7 days before a medical intervention. A sample obtained after medical intervention preferably, may be obtained within 2 h, 6 h, 12 h, 24 h, 36 h, 48 h or within 7 days after completion of medical intervention.

[0284] Determining the amount of the biomarkers referred to in this specification relates to measuring the amount or concentration, preferably semi-quantitatively or quantitatively. Measuring can be done directly or indirectly. Direct measuring relates to measuring the amount or concentration of the biomarker based on a signal that is obtained from the biomarker itself and the intensity of which directly or indirectly correlates with the number of molecules of the polypeptide present in the sample.

[0285] Such a signal—sometimes referred to herein as intensity signal may be obtained, e.g., by measuring an intensity value of a specific physical or chemical property of the polypeptide. Indirect measuring includes measuring of a signal obtained from a secondary component (i.e. a component not being the biomarker itself) or a biological read out system, e.g., measurable cellular responses, ligands, labels, or enzymatic reaction products.

[0286] In accordance with the present invention, determining the amount of a biomarker can be achieved by different means for determining the amount of a biomarker in a sample. Said means comprise immunoassay devices and methods that may utilize labeled molecules in various sandwich, competition, or other assay formats. Preferably, the immunoassay device is an antibody array, in particular a planar antibody microarray or a bead based antibody microarray. Also preferred are stripe tests. Said assays will develop a signal which is indicative for the presence or absence of the biomarker, e.g. a polypeptide biomarker.

[0287] Moreover, the signal strength can, preferably, be correlated directly or indirectly (e.g. proportional, or reverse-proportional) to the amount of biomarker present in a sample. Further suitable methods comprise measuring a physical or chemical property specific for the biomarker such as its precise molecular mass or NMR spectrum. Said methods comprise, preferably, biosensors, optical devices coupled to immunoassays, biochips, analytical devices such as mass-spectrometers, NMR-analyzers, or chromatography devices. Further, methods include micro-plate ELISA-based methods, fully-automated or robotic immunoassays, CBA (an enzymatic Cobalt Binding Assay), or latex agglutination assays. The determination of the amount of a biomarker can be performed in a medical laboratory or it can consist of a point-of-care testing.

[0288] Also preferably, determining the amount of a biomarker may comprise the step of measuring a specific intensity signal obtainable from the biomarker in the sample. As described above, such a signal may be the signal intensity observed at a mass to charge (m/z) variable specific for the biomarker observed in mass spectra or an NMR spectrum specific for the biomarker.

[0289] Determining the amount of a biomarker may, preferably, comprise the steps of
[0290] aa) contacting the biomarker with a specific ligand,
[0291] ab) optionally, removing non-bound ligand, and
[0292] ac) measuring the amount of bound ligand.

[0293] The bound ligand will generate an intensity signal. Binding includes both covalent and non-covalent binding. A ligand can be any compound, e.g., a peptide, polypeptide, nucleic acid, or small molecule, binding to the biomarker described herein. Preferred ligands include antibodies, nucleic acids, peptides or polypeptides such as receptors or binding partners for the biomarker and fragments thereof comprising the binding domains for the peptides, and aptamers, e.g. nucleic acid or peptide aptamers. Methods to prepare such ligands are well-known in the art. For example, identification and production of suitable antibodies or aptamers is also offered by commercial suppliers. The person skilled in the art is familiar with methods to develop derivatives of such ligands with higher affinity or specificity. For example, random mutations can be introduced into the nucleic acids, peptides or polypeptides. These derivatives can then be tested for binding according to screening procedures known in the art, e.g. phage display. Antibodies as referred to herein include both polyclonal and monoclonal antibodies, as well as fragments thereof, such as Fv, Fab, scFv and F(ab)2 fragments that are capable of binding antigen or hapten. The present invention also includes single chain antibodies and humanized hybrid antibodies wherein amino acid sequences of a non-human donor antibody exhibiting a desired antigen-specificity are combined with sequences of a human acceptor antibody. Alternatively, chimeric mouse antibodies with rabbit Fc can be used. The donor sequences will usually include at least the antigen-binding amino acid residues of the donor but may comprise other structurally and/or functionally relevant amino acid residues of the donor antibody as well. Such hybrids can be prepared by several methods well known in the art. Preferably, the ligand or agent binds specifically to the biomarker.

[0294] “Specific binding” according to the present invention means that the ligand or agent should not bind substantially to (“cross-react” with) another biomarker, polypeptide or substance present in the sample to be analyzed. Preferably, the specifically bound biomarker should be bound with at least 3 times higher, more preferably at least 10 times higher and even more preferably at least 50 times higher affinity than any other substance, biomarker or polypeptide in the sample. Non-specific binding may be tolerable, if it can still be distinguished and measured unequivocally, e.g. according to its size on a Western Blot, or by its relatively higher abundance in the sample.

[0295] Binding of the ligand can be measured by any method known in the art. Preferably, said method is semi-quantitative or quantitative. Suitable methods are described in the following. First, binding of a ligand may be measured directly, e.g. by mass spectroscopy, NMR or surface plasmon resonance. Second, if the ligand also serves as a substrate of an enzymatic activity of the biomarker of interest, an enzymatic reaction product may be measured (e.g. the amount of a protease can be measured by measuring the amount of cleaved substrate, e.g. on a Western Blot). Alternatively, the ligand may exhibit enzymatic properties itself and the “ligand/biomarker” complex or the ligand that was bound by the biomarker, respectively, may be contacted with a suitable substrate allowing detection by the generation of an intensity signal.

[0296] For measurement of enzymatic reaction products, preferably the amount of substrate is saturating. The substrate may also be labeled with a detectable label prior to the reaction. Preferably, the sample is contacted with the substrate for an adequate period of time. An adequate period of time refers to the time necessary for a detectable, preferably measurable, amount of product to be produced. Instead of measuring the amount of product, the time necessary for appearance of a given (e.g. detectable) amount of product can be measured. Third, the ligand may be coupled covalently or non-covalently to a label allowing detection and measurement of the ligand.

[0297] Labeling may be done by direct or indirect methods. Direct labeling involves coupling of the label directly (covalently or non-covalently) to the ligand. Indirect labeling involves binding (covalently or non-covalently) of a secondary ligand to the first ligand. The secondary ligand should specifically bind to the first ligand. Said secondary ligand may be coupled with a suitable label and/or be the target (receptor) of a tertiary ligand binding to the secondary ligand. The use of secondary, tertiary or even higher order ligands is often used to increase the signal. Suitable secondary and higher order ligands may include antibodies, secondary antibodies, and the well-known streptavidin-biotin system (Vector Laboratories, Inc.).

[0298] The ligand or substrate may also be “tagged” with one or more tags. Such tags may then be targets for higher order ligands. Suitable tags include biotin, digoxygenin, His-Tag, Glutathion-S-Transferase, FLAG, GFP, myc-tag, influenza A virus haemagglutinin (HA), maltose binding protein, and the like. In the case of a peptide or polypeptide, the tag is preferably at the N-terminus and/or C-terminus. Suitable labels are any labels detectable by an appropriate detection method. Typical labels include gold particles, latex beads, acridan ester, luminol, ruthenium, enzymatically active labels, radioactive labels, magnetic labels (“e.g. magnetic beads”, including paramagnetic and superparamagnetic labels), and fluorescent labels. Enzymatically active labels include e.g. horseradish peroxidase, alkaline phosphatase, beta-Galactosidase, Luciferase, and derivatives thereof. Suitable substrates for detection include di-amino-benzidine (DAB), 3,3′-5,5′-tetramethylbenzidine, NBT-BCIP (4-nitro blue tetrazolium chloride and 5-bromo-4-chloro-3-indolyl-phosphate, available as ready-made stock solution from Roche Diagnostics), CDP-Star™ (Amersham Biosciences), ECF™ (Amersham Biosciences). A suitable enzyme-substrate combination may result in a colored reaction product, fluorescence or chemo luminescence, which can be measured according to methods known in the art (e.g. using a light-sensitive film or a suitable camera system). As for measuring the enzymatic reaction, the criteria given above apply analogously.

[0299] Suitable fluorescent labels include fluorescent proteins (such as GFP and its derivatives), Cy3, Cy5, or scioDye 1, scioDye 2, scioDye 3, scioDye 4 (Sciomics, Germany) or Texas Red, Fluorescein, and the Alexa dyes (e.g. Alexa 568). Further fluorescent labels are available e.g. from Molecular Probes (Oregon) or Dyomics (Germany). Further, the use of quantum dots as fluorescent labels is contemplated. Suitable radioactive labels include <35>S, <125>I, <32>P, <33>P and the like. A radioactive label can be detected by any method known and appropriate, e.g. a light-sensitive film or a phosphor imager. Suitable measurement methods include precipitation (particularly immunoprecipitation), electro-chemiluminescence (electro-generated chemiluminescence), RIA (radioimmunoassay), ELISA (enzyme-linked immunosorbent assay), sandwich enzyme immune tests, electro-chemiluminescence sandwich immunoassays (ECLIA), dissociation-enhanced lanthanide fluoro immuno assay (DELFIA), scintillation proximity assay (SPA), FRET based proximity assays (Pulli et al., 2005) or Ligation proximity assays (Fredriksson et al., 2002), turbidimetry, nephelometry, latex-enhanced turbidimetry or nephelometry, or solid phase immune tests. Further methods such as gel electrophoresis, 2D gel electrophoresis, SDS polyacrylamide gel electrophoresis (SDS-PAGE), Western Blotting, and mass spectrometry can be used alone or in combination with labeling or other detection methods as described above.

[0300] The amount of a biomarker may be, also preferably, determined as follows:
[0301] a1) contacting a solid support comprising a ligand for the biomarker as specified above with a sample comprising the biomarker,
[0302] a2) optionally, removing non-bound biomarker, and
[0303] a3) measuring the amount of biomarker which is bound to the support.

[0304] The ligand, preferably, chosen from the group consisting of nucleic acids, peptides, polypeptides, antibodies and aptamers, is preferably present on a solid support in immobilized form.

[0305] Materials for manufacturing solid supports are well known in the art and include, inter alia, commercially available column materials, polystyrene beads, latex beads, magnetic beads, colloid metal particles, glass and/or silicon chips and surfaces, nitrocellulose strips, membranes, sheets, duracytes, wells and walls of reaction trays, plastic tubes, or combinations thereof.

[0306] The ligand or agent may be bound to many different carriers. Examples of well-known carriers include glass, polystyrene, polyvinyl chloride, polypropylene, polyethylene, polycarbonate, dextran, nylon, amyloses, natural and modified celluloses, polyacrylamides, agaroses, and magnetite. The nature of the carrier can be either soluble or insoluble for the purposes of the invention.

[0307] Suitable methods for fixing/immobilizing said ligand include, but are not limited to ionic, hydrophobic, covalent interactions and the like. It is also contemplated to use “suspension arrays” as arrays according to the present invention (Nolan & Sklar, 2002). In such suspension arrays, the carrier, e.g. a microbead or microsphere, is present in suspension. The array consists of different microbeads or microspheres, possibly labeled, carrying different ligands. Methods of producing such arrays, for example based on solid-phase chemistry and photo-labile protective groups, are disclosed in U.S. Pat. No. 5,744,305, which is incorporated by reference as if fully set forth herein.

[0308] The term “amount” as used herein encompasses the absolute amount of a biomarker, the relative amount or concentration of the said biomarker as well as any value or parameter which correlates thereto or can be derived therefrom. Such values or parameters comprise intensity signal values from all specific physical or chemical properties obtained from the said biomarker by direct measurements, e.g., intensity values in mass spectra or NMR spectra or surface Plasmon resonance spectra. Moreover, encompassed are all values or parameters which are obtained by indirect measurements specified elsewhere in this description, e.g., response levels determined from biological read out systems in response to the peptides or intensity signals obtained from specifically bound ligands. It is to be understood that values correlating to the aforementioned amounts or parameters can also be obtained by all standard mathematical operations.

[0309] The term “comparing” as used herein encompasses comparing the amount of the biomarker comprised in the sample to be analyzed with an amount of a suitable reference source specified elsewhere in this description. It is to be understood that “comparing” as used herein refers to a comparison of corresponding parameters or values, e.g., an absolute amount is compared to an absolute reference amount, while a concentration is compared to a reference concentration, or an intensity signal obtained from a test sample is compared to the same type of intensity signal of a reference sample. Preferably, the reference amount is the amount of the biomarker in healthy subjects, e.g. the average amount of the respective biomarker in a group of 10 or more, 30 or more, 50 or more, or 100 or more healthy subjects.

[0310] The comparison of the method of the present invention may be carried out manually or computer assisted. For a computer assisted comparison, the value of the determined amount may be compared to values corresponding to suitable references, which are stored in a database by a computer program. The computer program may further evaluate the result of the comparison, i.e. automatically provide the desired assessment in a suitable output format. Based on the comparison of the amount determined in step a) and the reference amount, it is possible to predict the risk of occurrence of AKI and/or diagnose AKI in a subject after medical intervention.

[0311] The term “reference” as used herein refers to amounts of the biomarker which allow for predicting whether a subject is at risk of occurrence of AKI or diagnosing AKI at an early time point. Therefore, the reference may either be derived from
[0312] (i) a subject known to be at risk of occurrence of AKI or diagnosed with AKI (or from a group of said subjects) or
[0313] (ii) a subject known not to be at risk of occurrence of AKI or not diagnosed with AKI (or from a group of said subjects). Preferably, said reference is derived from a sample of the aforementioned healthy subjects.

[0314] More preferably, a changed amount of the said at least one biomarker selected from the biomarkers according to SEQ ID No. 2-79, 84-97, 98-128, 135-185, 194-233, 237-248, 251-252 as well as CD15 (Table 2) compared to the reference is indicative for a subject being at risk or not being at risk of occurrence of AKI, whereas a changed amount of the said at least one biomarker selected from the biomarkers according to SEQ ID No. 1, 13, 80-83, 25-29, 129, 130, 18, 61-67, 131, 98, 99, 121, 132-134, 148-15, 112, 186-189, 93-97, 190, 52-60, 191-193, 234-250 as well as CD139 (Table 3) compared to the reference is indicative for a subject with AKI or without AKI at an early time point.

[0315] Preferably, the changes as referred to herein are statistically significant.

[0316] In the context of the methods of the present invention, the amount of more than one biomarker may be determined. Of course, the determined amounts may be compared to various reference amounts, i.e. to the reference amounts for the individual biomarker tested.

[0317] Moreover, the references, preferably, define threshold amounts or thresholds. Suitable reference amounts or threshold amounts may be determined by the method of the present invention from a reference sample to be analyzed together, i.e. simultaneously or subsequently, with the test sample. A preferred reference amount serving as a threshold may be derived from the upper limit of normal (ULN), i.e. the upper limit of the physiological amount to be found in a population of subjects (e.g. patients enrolled for a clinical trial). The ULN for a given population of subjects can be determined by well known techniques. A suitable technique may be to determine the median of the population for the biomarker amounts to be determined in the method of the present invention. Suitable threshold amounts can also be identified by ROC plots depicting the overlap between the two distributions by plotting the sensitivity versus 1−specificity for the complete range of decision thresholds. On the y-axis is sensitivity, or the true-positive fraction, defined as (number of true-positive test results)/(number of true-positive+number of false-negative test results). This has also been referred to as positivity in the presence of a given disease. It is calculated solely from the affected subgroup. On the x-axis is the false-positive fraction, or 1−specificity, defined as (number of false-positive results)/(number of true-negative+number of false-positive results). It is an index of specificity and is calculated entirely from the unaffected subgroup. Because the true- and false-positive fractions are calculated entirely separately, by using the test results from two different subgroups, the ROC plot is independent of the prevalence of disease in the sample. Each point on the ROC plot represents a sensitivity/1-specificity pair corresponding to a particular decision threshold. A test with perfect discrimination (no overlap in the two distributions of results) has a ROC plot that passes through the upper left corner, where the true-positive fraction is 1.0, or 100% (perfect sensitivity), and the false-positive fraction is 0 (perfect specificity). The theoretical plot for a test with no discrimination (identical distributions of results for the two groups) is a 45 degrees diagonal line from the lower left corner to the upper right corner. Most plots fall in between these two extremes.

[0318] Diagnosis

[0319] Further preferred are the following diagnostic algorithms:
[0320] i) An essentially identical or an increased amount of the at least one biomarker as compared to the reference amount indicates that the subject is at risk of occurrence of AKI or is diagnosed with AKI, if the at least one biomarker is selected from the biomarkers shown in Table 5, and if the reference amount is derived from a subject known to be at risk of occurrence of AKI or diagnosed with AKI, and/or an essentially identical or a decreased amount of the at least one biomarker as compared to the reference amount indicates that the subject is at no risk of occurrence of AKI or diagnosed with no occurrence of AKI, if the at least one biomarker is selected from the biomarkers shown in Table 5, and if the reference amount is derived from a subject known to be not at risk of occurrence of AKI or diagnosed with no occurrence of AKI.
[0321] ii) An essentially identical or a decreased amount of the at least one biomarker as compared to the reference amount indicates that the subject is at risk of occurrence of AKI or is diagnosed with AKI, if the at least one biomarker is selected from the biomarkers shown in Table 6, and if the reference amount is derived from a subject known to be at risk of occurrence of AKI or is diagnosed with AKI, and/or an essentially identical or an increased amount of the at least one biomarker as compared to the reference amount indicates that the subject is not at risk of occurrence of AKI or diagnosed with no occurrence of AKI, if the at least one biomarker is selected from the biomarkers shown in Table 6, and if the reference amount is derived from a subject known to be not at risk of occurrence of AKI or diagnosed with no occurrence of AKI.

[0322] Advantageously, it has been found in the study underlying the present invention that the biomarkers according to SEQ ID No. 1 to 304 as well as CD15 and CD139 are reliable markers for predicting the occurrence of AKI and/or for early diagnosis of AKI in a subject undergoing medical intervention.

[0323] Said prediction and early diagnosis is of high importance since AKI, in particular in the peri-operative setting, has a high incidence rate. AKI is associated with a high patient mortality and morbidity, with consequences such as chronic kidney disease (CKD) requiring life-long monitoring and treatment and resulting in high health care costs. The findings underlying the aforementioned method also a1-low for an improved clinical management of AKI since subjects can be identified which require a change in therapy plan.

[0324] Change in Therapy

[0325] It is to be understood that a subject who is at risk of AKI occurrence or a subject who is diagnosed at an early time point for AKI may require a change in therapy plan compared to a subject who is not at risk of AKI occurrence.

[0326] Therefore, the aforementioned method, preferably, further comprises the step of change of therapy plan. A change in therapy plan includes, as discussed above, renal dialysis, avoiding nephrotoxic drugs, administration of kidney-stabilizing drugs, administration of drugs preventing AKI, drugs alleviating or reversing AKI effects or drugs preventing further development of AKI into CKD, avoiding anemia, optimization of the strategy of the surgical intervention, stringent observation of the patient possibly leading to earlier intervention.

### Definition

[0327] The term ‘dialysis’ as used herein refers to a procedure required when a subject develops end-stage kidney failure, which corresponds to less than 15% of kidney function. Kidney failure can be acute as in AKI or the result of a slowly worsening kidney function as in CKD. Dialysis relies on the principle of osmosis of solutes and ultrafiltration of fluid across a semi-permeable membrane. The main purpose of dialysis is to remove excess water, solutes and toxins from the blood of a subject, thereby partially replacing the functions of a healthy kidney. Dialysis can be performed at an early time point if AKI is diagnosed within 24 h upon medical intervention.

[0328] The phrase ‘avoiding nephrotoxic drugs’ as used herein refers to avoiding substances, which impair renal function if the subject is at risk of AKI or if AKI has been already diagnosed. These substances can be chemicals or medications and encompass analgesics, antibiotics, immunosuppressive drugs and contrast media, in particular radiocontrast media for example.

[0329] The phrase ‘avoiding anemia’ as used herein refers to avoiding a decrease in the total amount of red blood cells (RBCs) or hemoglobin in the blood, or a lowered ability of the blood to carry oxygen.

[0330] The phrase ‘administration of kidney-stabilizing drugs’ as used herein refers to the administration of putative drugs which support the physiological function of the kidney if the subject is at risk of AKI or if AKI has been already diagnosed.

[0331] The phrase ‘administration of drugs preventing AKI’ as used herein refers to the administration of putative drugs which prevent the onset of AKI if the subject is at risk of AKI.

[0332] The phrase ‘drugs alleviating or reversing AKI effects’ as used herein refers to the administration of putative drugs which reduce AKI related symptoms and severity of disease.

[0333] The phrase ‘drugs preventing further development of AKI into CKD’ as used herein refers to the administration of putative drugs which prevent the development of AKI into the chronic disease CKD.

[0334] The phrase ‘optimization of the strategy of the surgical intervention’ as used herein refers to the use of surgical methods to shorten the overall duration of the surgical intervention, thereby shortening the time during which a patient is relying on a heart-lung-machine. A heart-lung-machine is a mechanical device composed of a pump, an oxygenator and a heat exchanger to take over the heart and lung function during a surgical intervention.

[0335] The phrase ‘stringent observation of the patient possibly leading to earlier intervention’ as used herein refers to reducing the surveillance interval if the subject is at risk of AKI.

[0336] The definitions and explanations given herein above apply mutatis mutandis to the embodiments described herein below (except stated otherwise).

[0337] Change in Therapy (Details)

[0338] In an embodiment, the method may include the step of changing the subject's therapy plan, if the method reveals that the subject is suffering from AKI or has a high risk that AKI might occur. It will be understood that a change in therapy plan is at least beneficial for such subject. As discussed above, the method of the present invention already allows identifying subjects at risk of AKI. Accordingly, such subjects may not be unambiguously identifiable based on their clinical symptoms.

[0339] In one embodiment the change in therapy plan may include subjecting the subject, suffering from AKI or having a high risk that AKI might occur, to a therapy via peritoneal dialysis, which is preferably carried out with a combination of D-glucose and L-carnitine, further preferred D-glucose about 1.5% (weight/volume) and/or L-carnitine about 0.1% (weight/volume).

[0340] Optional changes in therapy plan are described herein above.

[0341] Preferably, the reference is derived from a subject or group of subjects known to be in need of a change in therapy plan, or from a subject or group of subjects known to be not in need of a change in therapy plan.

[0342] Preferably, the sample to be tested has been obtained after medical intervention. More preferably, the sample has been obtained after medical intervention, in particular, after surgical intervention.

[0343] More preferably, the sample has been obtained after surgical intervention, in particular, after solid organ transplantation, cardiac surgery or knee or hip replacement surgery. More preferably, the sample has been obtained after solid organ transplantation, in particular, after lung transplantation, liver transplantation, heart transplantation or kidney transplantation. Even more preferably, the sample has been obtained after lung transplantation, in particular, after lung transplantation in male subjects.

[0344] Device for Predicting AKI or Early Diagnosis of AKI

[0345] The present invention also relates to a device for predicting occurrence of AKI or for the early diagnosis of AKI in a sample of a subject comprising:
[0346] an analyzing unit for the said sample of the subject comprising a detection agent for at least one biomarker of this invention, or variants or fragments thereof, said detection agent allowing for the determination of the amount of the said at least one biomarker in the sample, and
[0347] an evaluation unit comprising a data processing unit and a data base, said data base comprising a stored reference and said data processing unit being capable of carrying out a comparison of the amount of the at least one biomarker determined by the analyzing unit and the stored reference thereby establishing the prediction.

[0348] The biomarker may be selected from any group of biomarkers disclosed herein, such as protein biomarkers, male patient biomarkers, predictive biomarkers, diagnostic biomarkers, or combined predictive and diagnostic biomarkers, as well as combinations thereof and fragments and variants thereof.

[0349] The biomarker may be selected from the group consisting of CD9 antigen, Prostaglandin G/H synthase 2, CD15, CD99 antigen, CD99R antigen, High affinity immunoglobulin epsilon receptor subunit alpha, Ligands of Tumor necrosis factor receptor superfamily member 1B including Tumor necrosis factor and Lymphotoxin-alpha, Tumor necrosis factor receptor superfamily member 6, Interferon alpha-1/13, Basigin, C-C motif, chemokine 7, Dickkopf-related protein 2, Hyaluronan mediated motility receptor, Interleukin-18, Interleukin-7, Major prion protein, Receptor-type tyrosine-protein phosphatase C, P-selectin glycoprotein ligand 1, Tumor necrosis factor ligand superfamily member 14, DNA topoisomerase 2-alpha, Brain-derived neurotrophic factor, Caspase-8, Eotaxin, C-C motif chemokine 3, C-C motif chemokine 5, Monocyte differentiation antigen CD14, Cytokine receptor-like factor 2, Lamin-B1, Cellular tumor antigen p53, Serine/threonine-protein kinase PAK 1, Caspase-9, Transforming growth factor-beta-induced protein ig-h3, Leukocyte surface antigen CD47, T-cell surface glycoprotein CD8 alpha chain, Dickkopf-related protein 3, Growth arrest-specific protein 6, Interleukin-15, Cytokine receptor common subunit beta, Keratin type II cytoskeletal 8, Leukosialin, MAP/microtubule affinity-regulating kinase 4, Melanophilin, Interstitial collagenase, Matrilysin, Prostaglandin G/H synthase 1, Myeloblastin, RNA-binding protein 3, Serum amyloid P-component, Tetraspanin-16, Urokinase-type plasminogen activator, CTP synthase 1, CD139, Max dimerization protein 4, Transmembrane protein 54, Actin cytoplasmic 1, Caspase-3, Complement decay-accelerating factor, High mobility group protein B2, Homeobox protein, Hox-C11, Intercellular adhesion molecule 1, Interleukin-12 subunit alpha, Krueppel-like factor 8, Galectin-4, Ragulator complex protein LAMTOR1, L-selectin, Mitogen-activated protein kinase 3, Mucin-5B, Nuclear factor of activated T-cells, Transforming growth factor beta-1 proprotein, Serine/threonine-protein kinase VRK1, Cyclin-dependent kinase inhibitor 3, Tissue factor pathway inhibitor 2, Microtubule-associated proteins 1A/1B light chain 3B, Phosphatidylinositol 3,4,5-trisphosphate 3-phosphatase and dual-specificity protein phosphatase PTEN, Interleukin-8, Rho guanine nucleotide exchange factor 2, CASP8 and FADD-like apoptosis regulator, CUE domain-containing protein 2, Death-associated protein kinase 1, Endothelin-1 receptor, Eukaryotic translation initiation factor 3 subunit B, DNA-binding protein inhibitor ID-2, Prelamin-A/C, CAD protein, Zinc finger protein 593, Mitogen-activated protein kinase 12, Cytochrome P450 1B1, Angiotensinogen, Adenomatous polyposis coli protein, POU domain class 2 transcription factor 1, Somatostatin receptor type 4, Tumor necrosis factor alpha-induced protein 3, E3 ubiquitin-protein ligase TRIM22, Complement factor D, Neurotrophin-4, Insulin-like growth factor-binding protein 1, Cystatin-B, Interleukin-18-binding protein, WAP four-disulfide core domain protein 2, Haptoglobin, Uteroglobin, Chitinase-3-like protein 1, Elafin, Cartilage oligomeric matrix protein, Interleukin-16 and Inter-alpha-trypsin inhibitor heavy chain H1 (SEQ ID No. 1 to 304 as well as CD15 and CD139), and isoforms, fragments and variants thereof.

[0350] Biomarker CD99R is recognized by antibody MEM-131 which reacts with an epitope which is restricted to a subset of CD99 molecules expressed on myeloid cells, NK cells and T lymphocytes.

[0351] The term “device” as used herein relates to a system of means comprising at least the afore-mentioned analyzing unit and the evaluation unit operatively linked to each other as to allow the diagnosis. Preferred detection agents to be used for the device of the present invention are disclosed above in connection with the method of the invention. Preferably, detection agents are antibodies or aptamers. How to link the units of the device in an operating manner will depend on the type of units included into the device. For example, where units for automatically determining the amount of the biomarker are applied, the data obtained by said automatically operating unit can be processed by, e.g., a computer program in order to obtain the desired results. Preferably, the units are comprised by a single device in such a case. The computer unit, preferably, comprises a database including the stored reference(s) as well as a computer-implemented algorithm for carrying out a comparison of the determined amounts for the biomarkers with the stored reference of the database. “Computer-implemented” as used herein refers to a computer-readable program code tangibly included into the computer unit. The results may be given as output of raw data which need interpretation by the clinician. Preferably, the output of the device is, however, processed, i.e. evaluated, raw data the interpretation of which does not require a clinician.

[0352] In a preferred device of the invention, the detection agent, preferably, an antibody is immobilized on a solid support in an array format. It will be understood that a device according to the present invention can determine the amount of more than one biomarker simultaneously. To this end, the detection agents may be immobilized on a solid support and arranged in an array format, e.g., in a so called “microarray”.

[0353] Kit

[0354] The present invention also relates to a kit comprising a detection agent for determining the amount of at least one biomarker of this invention, or variants or fragments thereof, and evaluation instructions for establishing the prediction or early diagnosis of AKI.

[0355] The biomarker may be selected from any group of biomarkers disclosed herein, such as protein biomarkers, male patient biomarkers, predictive biomarkers, diagnostic biomarkers, or combined predictive and diagnostic biomarkers, as well as combinations thereof and fragments and variants thereof.

[0356] In an embodiment, the biomarker is selected from the group consisting of CD9 antigen, Prostaglandin G/H synthase 2, CD15, CD99 antigen, CD99R antigen, High affinity immunoglobulin epsilon receptor subunit alpha, Ligands of Tumor necrosis factor receptor superfamily member 1B including Tumor necrosis factor and Lymphotoxin-alpha, Tumor necrosis factor receptor superfamily member 6, Interferon alpha-1/13, Basigin, C-C motif, chemokine 7, Dickkopf-related protein 2, Hyaluronan mediated motility receptor, Interleukin-18, Interleukin-7, Major prion protein, Receptor-type tyrosine-protein phosphatase C, P-selectin glycoprotein ligand 1, Tumor necrosis factor ligand superfamily member 14, DNA topoisomerase 2-alpha, Brain-derived neurotrophic factor, Caspase-8, Eotaxin, C-C motif chemokine 3, C-C motif chemokine 5, Monocyte differentiation antigen CD14, Cytokine receptor-like factor 2, Lamin-B1, Cellular tumor antigen p53, Serine/threonine-protein kinase PAK 1, Caspase-9, Transforming growth factor-beta-induced protein ig-h3, Leukocyte surface antigen CD47, T-cell surface glycoprotein CD8 alpha chain, Dickkopf-related protein 3, Growth arrest-specific protein 6, Interleukin-15, Cytokine receptor common subunit beta, Keratin type II cytoskeletal 8, Leukosialin, MAP/microtubule affinity-regulating kinase 4, Melanophilin, Interstitial collagenase, Matrilysin, Prostaglandin G/H synthase 1, Myeloblastin, RNA-binding protein 3, Serum amyloid P-component, Tetraspanin-16, Urokinase-type plasminogen activator, CTP synthase 1, CD139, Max dimerization protein 4, Transmembrane protein 54, Actin cytoplasmic 1, Caspase-3, Complement decay-accelerating factor, High mobility group protein B2, Homeobox protein, Hox-C11, Intercellular adhesion molecule 1, Interleukin-12 subunit alpha, Krueppel-like factor 8, Galectin-4, Ragulator complex protein LAMTOR1, L-selectin, Mitogen-activated protein kinase 3, Mucin-5B, Nuclear factor of activated T-cells, Transforming growth factor beta-1 proprotein, Serine/threonine-protein kinase VRK1, Cyclin-dependent kinase inhibitor 3, Tissue factor pathway inhibitor 2, Microtubule-associated proteins 1A/1B light chain 3B, Phosphatidylinositol 3,4,5-trisphosphate 3-phosphatase and dual-specificity protein phosphatase PTEN, Interleukin-8, Rho guanine nucleotide exchange factor 2, CASP8 and FADD-like apoptosis regulator, CUE domain-containing protein 2, Death-associated protein kinase 1, Endothelin-1 receptor, Eukaryotic translation initiation factor 3 subunit B, DNA-binding protein inhibitor ID-2, Prelamin-A/C, CAD protein, Zinc finger protein 593, Mitogen-activated protein kinase 12, Cytochrome P450 1B1, Angiotensinogen, Adenomatous polyposis coli protein, POU domain class 2 transcription factor 1, Somatostatin receptor type 4, Tumor necrosis factor alpha-induced protein 3, E3 ubiquitin-protein ligase TRIM22, Ligands of Tumor necrosis factor receptor superfamily member 1B including Tumor necrosis factor and Lymphotoxin-alpha), Complement factor D, Neurotrophin-4, Insulin-like growth factor-binding protein 1, Cystatin-B, Interleukin-18-binding protein, WAP four-disulfide core domain protein 2, Haptoglobin, Uteroglobin, Chitinase-3-like protein 1, Elafin, Cartilage oligomeric matrix protein, Interleukin-16 and Inter-alpha-trypsin inhibitor heavy chain H1, (SEQ ID No. 1 to 304 as well as CD15, CD139) and isoforms fragments and variants thereof.

[0357] The term “kit” as used herein refers to a collection of the aforementioned agent and the instructions provided in a ready-to-use manner for determining the biomarker amount in a sample. The agent and the instructions are, preferably, provided in a single container. Preferably, the kit also comprises further components which are necessary for carrying out the determination of the amount of the biomarker. Such components may be auxiliary agents which are required for the detection of the biomarker or calibration standards. Moreover, the kit may, preferably, comprise agents for the detection of more than one biomarker.

[0358] In one embodiment the kit may further comprise a pharmaceutical composition comprising a compound selected from the group consisting of beta-casomorphin, alpha calcitonin gene related peptide (alpha CGRP), beta calcitonin gene related peptide (beta CGRP) lampalizumab, recombinant human C1 esterase inhibitor, ruconest, suramin, a bone morphogenetic protein-7 agonist (e.g. THR-184), an α-melanocyte-stimulating hormone analog (e.g. ABT-719), a hepatocyte growth factor (HGF) mimetic (e.g. ANG-3777), deferoxamine, and/or any combination thereof. Alternatively or additionally, the compound may be QPI-1002 (teprasiran, 15NP) and/or ASP1128 (a selective peroxisome proliferator-activated receptor delta modulator).

[0359] In one embodiment, such a kit may be used in a theranostic-concept (i.e. in form of personalized medicine). As such the subject is first analyzed with respect to the biomarkers and then the dosage and treatment concept is adapted accordingly, preferably with one of the before mentioned compounds and/or pharmaceutical compositions.

[0360] Multiple groups have been described above that the biomarker of the present invention may preferably be selected from. These groups have in particular been described with respect to the method of the present invention. However, it is to be understood that these groups are not only relevant with respect to the methods of the invention but also with respect to the kits, devices, and uses of the present invention.

[0361] It is particularly envisaged that the detection agents, preferably, an antibody or fragment thereof, comprised by the aforementioned kits or compositions are immobilized on a solid support in an array format. In particular, the detection agents may be immobilized on a solid support and arranged in an array format, e.g., in a so-called “microarray”. Accordingly, the present invention also envisaged a microarray comprising the aforementioned detection agents.

[0362] Preferably, the kit, the composition and the microarray is used for predicting the risk of occurrence of AKI and diagnosing AKI in a sample of a subject.

[0363] All references cited in this specification are herewith incorporated by reference with respect to their entire disclosure content and the disclosure content specifically mentioned in this specification.

### Embodiments

[0364] The following is a list of embodiments within the scope of the present invention.

[0365] The invention includes a method for predicting the risk of occurrence of acute kidney injury (AKI) or for early diagnosis of AKI in a subject, comprising the steps of:
[0366] a. determining in a sample obtained from the subject the amount of at least one biomarker having a log FC of less than −0.7 and being selected from the group consisting of CD15, CD9 antigen and Myeloblastin, as well as isoforms, fragments and variants thereof, and
[0367] b. comparing the amount of said at least one biomarker with a reference amount for said at least one biomarker, wherein the reference amount is the amount of the respective biomarker in healthy subjects, such as subjects who are not at risk of developing AKI and/or who are not having AKI.

[0368] In a further aspect the invention includes a method for predicting the risk of occurrence of acute kidney injury (AKI) or for early diagnosis of AKI in a subject, comprising the steps of:
[0369] a. determining in a sample obtained from the subject the amount of at least one biomarker having a log FC of less than −0.7 and being selected from the group consisting of Nuclear factor of activated T-cells, Interferon alpha-1/13 and Myeloblastin, as well as isoforms, fragments and variants thereof, and
[0370] b. comparing the amount of said at least one biomarker with a reference amount for said at least one biomarker,

[0371] wherein the reference amount is the amount of the respective biomarker in healthy subjects, such as subjects who are not at risk of developing AKI and/or who are not having AKI. The method includes embodiments, wherein a reduced amount of the at least one biomarker compared to the reference amount indicates that the subject has AKI or is at risk of developing AKI.

[0372] The method includes embodiments, comprising the step of predicting whether the subject is at risk of developing AKI and/or has AKI.

[0373] The method includes embodiments, including determining in the sample the amount of at least CD15 and Dickkopf-related protein 2, or isoforms, fragments or variants thereof.

[0374] The method includes embodiments, including determining in the sample the amount of at least CD9 antigen and Myeloblastin, or isoforms, fragments or variants thereof.

[0375] The method includes embodiments, including determining in the sample the amount of at least Dickkopf-related protein 2 and Interferon alpha-1/13, or isoforms, fragments or variants thereof.

[0376] The method includes embodiments, including determining in the sample the amount of Dickkopf-related protein 2 and Hyaluronan mediated motility receptor, or isoforms, fragments or variants thereof.

[0377] The method includes embodiments, including determining in the sample the amount of at least Nuclear factor of activated T-cells and Myeloblastin, or isoforms, fragments or variants thereof.

[0378] The method includes embodiments, including determining in the sample the amount of at least Interferon alpha-1/13 and Myeloblastin, or isoforms, fragments or variants thereof.

[0379] The method includes embodiments, including determining in the sample the amount of at least Nuclear factor of activated T-cells and Interferon alpha-1/13, or isoforms, fragments or variants thereof.

[0380] The method includes embodiments, including determining in the sample the amount of Nuclear factor of activated T-cells and Hyaluronan mediated motility receptor, or isoforms, fragments or variants thereof.

[0381] The method includes embodiments, wherein the sample is a urine, blood, plasma or serum sample.

[0382] The method includes embodiments, wherein the sample is taken prior to a planned medical intervention such as administration of a drug, avoiding administration of a drug, injection of contrast media or a surgical intervention.

[0383] The method includes embodiments, wherein one, two, three or more further biomarkers are determined in the sample, wherein further biomarkers are selected from one or more of the protein biomarkers, male patient biomarkers, predictive biomarkers, diagnostic biomarkers, or combined predictive and diagnostic biomarkers, wherein

[0384] The method includes embodiments, wherein the fragments, isoforms and/or variants of the biomarkers have at least 70%, at least 80%, at least 90%, at least 95%, at least 98%, or at least 99% sequence identity with the biomarker over the whole length of the sequence.

[0385] The method includes embodiments, wherein determining the amount of said at least one biomarker comprises using an immunoassay device, such as ELISA (enzyme-linked immunosorbent assay) or antibody array, in particular a planar antibody microarray or a bead based antibody microarray.

[0386] The invention includes a device for predicting the risk of occurrence of acute kidney injury (AKI) in a subject or for early diagnosis of AKI, comprising
[0387] an analyzing unit for the said sample of the subject comprising a detection agent for at least one biomarker, or variants or fragments thereof, said detection agent allowing for the determination of the amount of the said at least one biomarker in the sample, and
[0388] an evaluation unit comprising a data processing unit and a data base, said data base comprising a stored reference and said data processing unit being capable of carrying out a comparison of the amount of the at least one biomarker determined by the analyzing unit and the stored reference thereby establishing the prediction,
[0389] wherein the biomarker is at least one selected from the group consisting in one embodiment of CD15, CD9 antigen and Myeloblastin in another embodiment of Nuclear factor of activated T-cells, Interferon alpha-1/13 and Myeloblastin, as well as isoforms, fragments and variants thereof.

[0390] The invention includes a kit comprising a detection agent for determining the amount of at least one biomarker, and evaluation instructions for establishing the prediction or early diagnosis of AKI, wherein the biomarker is at least one selected from the group consisting of CD15, CD9 antigen and Myeloblastin as well as isoforms, fragments and variants thereof.

[0391] The invention includes a kit, wherein the detection agent is selected from the group consisting of antibodies and aptamers.

### EXAMPLES

[0392] Method

[0393] In the studies underlying this invention, plasma samples from subjects before and after LuTx (lung transplantation) were analyzed using antibody microarrays comprising 1130 antibodies against 930 different potential biomarkers. It was assessed whether there are differences between subjects in which AKI was diagnosed using the AKIN classification and subjects in whom AKI was not diagnosed using the AKIN classification. Differences in the marker amounts between subjects that turned out to be statistically significant are those of Table 1 below. These markers may be used as biomarkers for predicting the risk of occurrence of AKI and for early diagnosis of AKI.

[0394] In order to identify biomarkers with differential abundance in patients with and without an increased risk of AKI occurrence and between patients with and without AKI a study was performed utilizing complex antibody microarrays. In this study, the protein fraction of the samples was directly labeled by a fluorescent dye. A reference was established by pooling all samples comprised in the study and labeled with a second fluorescent dye. For incubation each sample was mixed with the reference sample and incubated on an antibody microarray in a competitive dual-color approach.

[0395] The antibody microarray applied in this study comprised 1130 antibodies that were directed at 900 different proteins. All antibodies were immobilized at least in duplicates. The studies involved a total of 135 samples with or without AKI. The samples were classified as no-AKI (AKIN0) or AKI (AKIN1, 2, 3).

[0396] After concentration measurement from the plasma samples by BCA assay, the samples were labeled at an adjusted protein concentration for one hour with scioDye-1 (Sciomics, Germany). Additionally, a common reference was prepared by pooling of samples and subsequent labeling with scioDye-2 (Sciomics, Germany). After one hour, the reaction was stopped by the addition of hydroxylamine. Excess dye was removed 30 min later and the buffer exchanged to PBS. All labeled protein samples were used immediately.

[0397] All samples were incubated on scioDiscover antibody arrays (Sciomics, Heidelberg, Germany). The arrays were blocked with scioBlock (Sciomics, Germany) and afterwards the samples were incubated competitively using a dual-colour approach. After incubation for three hours, the slides were thoroughly washed with 1×PBSTT, rinsed with 0.1×PBS as well as with water and subsequently dried with nitrogen.

[0398] Slide scanning was done on a Powerscanner (Tecan, Austria) using the identical instrument laser power and PMT. Spot segmentation was performed with GenePix Pro 6.0 (Molecular Devices, Union City, USA). Resulting data were analyzed using the LIMMA package of R-Bioconductor after uploading the mean signal and median background intensities. For normalization, an invariant Lowess normalization was applied. For differential analyses a linear model was fitted with LIMMA resulting in a two-sided t-test or F-test based on moderated statistics. All presented p-values were adjusted for multiple testing by controlling the false discovery rate according to Benjamini and Hochberg. Proteins were defined as differential for |log FC|>0.3 and an adjusted p value <0.05.

[0399] Using LIMMA analysis, 92 proteins were identified with differential abundance between AKI and non-AKI samples as differential, as defined above. The results of the aforementioned study are summarized in the following Tables. In the tables the difference of protein abundance in the two sample groups is given by the log fold change (log FC) calculated for the basis 2. The level of significance is indicated by the p-value adjusted for multiple testing as described above.

[0400] To assess the quality of the markers a Quality score (QS) was calculated for each marker taking into account log FC values, adjusted p-values as well as stripcharts (graphical representations of the distribution of abundance differences and discrimination power) as follows:
[0401] QS=QS [log FC]+QS [adjusted p-value]+QS [stripchart]
[0402] QS [log FC] is defined as “3” for |log FC|>1.0.
[0403] QS [log FC] is defined as “2” for |log FC|>0.7.
[0404] QS [log FC] is defined as “1” for |log FC|>0.5.
[0405] QS [adjusted p-value] is defined as “3” for adjusted p-value <0.0001.
[0406] QS [adjusted p-value] is defined as “2” for adjusted p-value <0.001.
[0407] QS [adjusted p-value] is defined as “1” for adjusted p-value <0.01.
[0408] For QS [stripchart] definition, discrimination power of stripcharts was classified after evaluation by expert scientists within a range of 0.5 to 2.0 as “excellent”=2.0, “very good”=1.0, “good”=0.5.
[0409] QS [stripchart] is defined as “1” for discrimination power=excellent or very good.
[0410] A maximum Quality score of 7 can be reached by one marker.
[0411] A Quality score of >5 is defined as “excellent”,
[0412] A Quality score of 4 is defined as “very high”,
[0413] A Quality score of 3 is defined as “high”.

[0414] “log FC” is defined as the log fold change calculated for the basis 2 and represents the differences in protein abundance between AKI patients and patients without AKI. In the case of the predictive method, “AKI patient” refers to a subject who developed AKI. A log FC=1 means that AKI patients have on average a 21=2 fold higher signal as compared to patients without AKI. log FC=−1 stands for 2⁻¹=½ of the signal in AKI patients compared to patients without AKI.

[0415] “adjusted p-values” are p-values adjusted for multiple testing and indicate the level of significance

[0416] “strip charts” are graphical representations of differential abundance distribution as well as discrimination power.

[0417] Results

[0418] The following tables identify biomarkers identified by the inventors.

[0419] The present invention comprises the 92 biomarkers as shown in Table 1. Table 1 comprises both predictive and diagnostic biomarkers.

TABLE 1

| | SEQ | | | | | | | | |
|---|---|---|---|---|---|---|---|---|---|
| | ID | Uniprot entry | Pre/ | Qual | | | Uniprot | | |
| No. | No. | name | diag | score | logFC | adj.p-Val | accession | Gene name | Protein name |
| 1 | 1 | PGH2_HUMAN | diag | 7 | −3.49 | 0.00000080 | P35354 | PTGS2 | Prostaglandin |
| | | | | | | | | | G/H synthase 2 |
| 2 | | CD15 (no | pre | 6 | −0.86 | 0.00000004 | no entry | CD15 | |
| | | protein) | | | | | | | |
| 3 | 2 | CD99_HUMAN | pre | 6 | −0.98 | 0.00000440 | P14209 | CD99 | CD99 antigen |
| | 3 | Isoform II of | | | | | P14209-2 | | |
| | | CD99_HUMAN | | | | | | | |
| | 4 | Isoform 3 of | | | | | P14209-3 | | |
| | | CD99_HUMAN | | | | | | | |
| 4 | 5 | FCERA_HUMAN | pre | 6 | −1.63 | 0.00049891 | P12319 | FCER1A | High affinity im- |
| | | | | | | | | | munoglobulin ep- |
| | | | | | | | | | silon receptor |
| | | | | | | | | | subunit alpha |
| 5 | 251- | No entry (Li- | pre | 6 | −1.60 | 0.00000083 | P01375 | TNF and | Ligands of Tumor |
| | 252 | gands of | | | | | and | LTA | necrosis factor |
| | | TNR1B_HUMAN | | | | | P01374 | | receptor super- |
| | | including | | | | | | | family member |
| | | TNFA_HUMAN | | | | | | | 1B including Tu- |
| | | and TNFB_HU- | | | | | | | mor necrosis fac- |
| | | MAN) | | | | | | | tor and Lympho- |
| | | | | | | | | | toxin-alpha |
| 6 | 6 | TNR6_HUMAN | pre | 6 | −1.32 | 0.00003060 | P25445 | FAS | Tumor necrosis |
| | | | | | | | | | factor receptor |
| | | | | | | | | | superfamily |
| | | | | | | | | | member 6 |
| | 7 | Isoform 2 of | | | | | P25445-2 | | |
| | | TNR6_Human | | | | | | | |
| | 8 | Isoform 3 of | | | | | P25445-3 | | |
| | | TNR6_Human | | | | | | | |
| | 9 | Isoform 4 of | | | | | P25445-4 | | |
| | | TNR6_Human | | | | | | | |
| | 10 | Isoform 5 of | | | | | P25445-5 | | |
| | | TNR6_Human | | | | | | | |
| | 11 | Isoform 6 of | | | | | P25445-6 | | |
| | | TNR6_Human | | | | | | | |
| | 12 | Isoform 7 of | | | | | P25445-7 | | |
| | | TNR6_Human | | | | | | | |
| 7 | 13 | IFNA1_HUMAN | pre | 3 | −0.99 | 0.03511896 | P01562 | IFNA1; | Interferon alpha- |
| | | | | | | | | IFNA13 | 1/13 |
| | | | diag | 6 | 1.09 | 0.00041027 | | | |
| 8 | 14 | BASI_HUMAN | pre | 5 | −1.00 | 0.00456896 | P35613 | BSG | Basigin |
| | 15 | Isoform 2 of | | | | | P35613-2 | | |
| | | BASI_Human | | | | | | | |
| | 16 | Isoform 3 of | | | | | P35613-3 | | |
| | | BASI_Human | | | | | | | |
| | 17 | Isoform 4 of | | | | | P35613-4 | | |
| | | BASI_Human | | | | | | | |
| 9 | 18 | CCL7_HUMAN | pre | 5 | −0.82 | 0.00082227 | P80098 | CCL7 | C-C motif |
| | | | | | | | | | chemokine 7 |
| | | | diag | 3 | 0.74 | 0.04367345 | | | |
| 10 | 19 | CD9_HUMAN | pre | 5 | −0.78 | 0.00077460 | P21926 | CD9 | CD9 antigen |
| 11 | 20 | DKK2_HUMAN | pre | 5 | −0.78 | 0.00077460 | Q9UBU2 | DKK2 | Dickkopf-related |
| | | | | | | | | | protein 2 |
| 12 | 21 | HMMR_HUMAN | pre | | | | O75330 | HMMR | Hyaluronan |
| | | | | | | | | | mediated motility |
| | | | | | | | | | receptor |
| | 22 | Isoform 2 of | | 5 | −1.02 | 0.00743181 | O75330-2 | | |
| | | HMMR_HUMAN | | | | | | | |
| | 23 | Isoform 3 of | | | | | O75330-3 | | |
| | | HMMR_HUMAN | | | | | | | |
| | 24 | isoform 4 of | | | | | O75330-4 | | |
| | | HMMR_HUMAN | | | | | | | |
| 13 | 25 | IL18_HUMAN | pre | 5 | −1.03 | 0.00709074 | Q14116 | IL18 | Interleukin-18 |
| | | | diag | 4 | 1.00 | 0.01705270 | | | |
| | 26 | Isoform 2 of | | | | | Q14116-2 | | |
| | | IL18_HUMAN | | | | | | | |
| 14 | 27 | IL7_HUMAN | pre | 5 | −0.98 | 0.00077460 | P13232 | IL7 | Interleukin-7 |
| | | | diag | 4 | 1.02 | 0.01917485 | | | |
| | 28 | Isoform 2 of | | | | | P13232-2 | | |
| | | IL7_HUMAN | | | | | | | |
| | 29 | Isoform 3 of | | | | | P13232-3 | | |
| | | IL7__HUMAN | | | | | | | |
| 15 | 30 | PRIO_HUMAN | pre | 5 | −0.95 | 0.00077460 | P04156 | PRNP | Major prion |
| | | | | | | | | | protein |
| 16 | 31 | PTPRC_HUMAN | pre | 5 | −0.93 | 0.00021371 | P08575 | PTPRC | Receptor-type ty- |
| | | | | | | | | | rosine-protein |
| | | | | | | | | | phosphatase C |
| | 32 | Isoform 2 of | | | | | P08575-4 | | |
| | | PTPRC_HUMAN | | | | | | | |
| | 33 | Isoform 3 of | | | | | P08575-5 | | |
| | | PTPRC_HUMAN | | | | | | | |
| | 34 | Isoform 4 of | | | | | P08575-6 | | |
| | | PTPRC_HUMAN | | | | | | | |
| | 35 | Isoform 5 of | | | | | P08575-7 | | |
| | | PTPRC_HUMAN | | | | | | | |
| | 36 | Isoform 6 of | | | | | P08575-8 | | |
| | | PTPRC_HUMAN | | | | | | | |
| | 37 | Isoform 7 of | | | | | P08575-9 | | |
| | | PTPRC_HUMAN | | | | | | | |
| | 38 | Isoform 8 of | | | | | P08575- | | |
| | | PTPRC_HUMAN | | | | | 10 | | |
| 17 | 39 | SELPL_HUMAN | pre | 5 | −0.96 | 0.00020190 | Q14242 | SELPLG | P-selectin |
| | | | | | | | | | glycoprotein |
| | | | | | | | | | ligand 1 |
| | 40 | Isoform 2 of | | | | | Q14242-2 | | |
| | | SELPL_HUMAN | | | | | | | |
| 18 | 41 | TNF14_HUMAN | pre | 5 | −1.23 | 0.00896522 | O43557 | TNFSF14 | Tumor necrosis |
| | | | | | | | | | factor ligand su- |
| | | | | | | | | | perfamily mem- |
| | | | | | | | | | ber 14 |
| | 42 | Isoform 2 of | | | | | O43557-2 | | |
| | | TNF14_HUMAN | | | | | | | |
| 19 | 43 | TOP2A_HUMAN | pre | 5 | −0.88 | 0.00077460 | P11388 | TOP2A | DNA |
| | | | | | | | | | topoisomerase 2- |
| | | | | | | | | | alpha |
| | 44 | Isoform 2 of | | | | | P11388-2 | | |
| | | TOP2A_HUMAN | | | | | | | |
| | 45 | Isoform 3 of | | | | | P11388-3 | | |
| | | TOP2A_HUMAN | | | | | | | |
| | 46 | Isoform 4 of | | | | | P11388-4 | | |
| | | TOP2A_HUMAN | | | | | | | |
| 20 | 47 | BDNF_HUMAN | pre | 4 | −1.03 | 0.03226915 | P23560 | BDNF | Brain-derived |
| | | | | | | | | | neurotrophic |
| | | | | | | | | | factor |
| | 48 | Isoform 2 of | | | | | P23560-2 | | |
| | | BDNF_HUMAN | | | | | | | |
| | 49 | Isoform 3 of | | | | | P23560-3 | | |
| | | BDNF_HUMAN | | | | | | | |
| | 50 | Isoform 4 of | | | | | P23560-4 | | |
| | | BDNF_HUMAN | | | | | | | |
| | 51 | Isoform 5 of | | | | | P23560-5 | | |
| | | BDNF_HUMAN | | | | | | | |
| 21 | 52 | CASP8_HUMAN | pre | 4 | −0.98 | 0.00743181 | Q14790 | CASP8 | Caspase-8 |
| | | | diag | 2 | 0.89 | 0.04367345 | | | |
| | 53 | Isoform 2 of | | | | | Q14790-2 | | |
| | | CASP8_HUMAN | | | | | | | |
| | 54 | Isoform 3 of | | | | | Q14790-3 | | |
| | | CASP8_HUMAN | | | | | | | |
| | 55 | Isoform 4 of | | | | | Q14790-4 | | |
| | | CASP8_HUMAN | | | | | | | |
| | 56 | isoform 5 of | | | | | Q14790-5 | | |
| | | CASP8_HUMAN | | | | | | | |
| | 57 | Isoform 6 of | | | | | Q14790-6 | | |
| | | CASP8_HUMAN | | | | | | | |
| | 58 | Isoform 7 of | | | | | Q14790-7 | | |
| | | CASP8_HUMAN | | | | | | | |
| | 59 | Isoform 8 of | | | | | Q14790-8 | | |
| | | CASP8_HUMAN | | | | | | | |
| | 60 | Isoform 9 of | | | | | Q14790-9 | | |
| | | CASP8_HUMAN | | | | | | | |
| 22 | 61 | CCL11_HUMAN | pre | 4 | −0.92 | 0.00743181 | P51671 | CCL11 | Eotaxin |
| | | | diag | 3 | 1.15 | 0.01633199 | | | |
| 23 | 62 | CCL3_HUMAN | pre | 4 | −1.00 | 0.03040191 | P10147 | CCL3 | C-C motif |
| | | | | | | | | | chemokine 3 |
| 24 | 63 | CCL5_HUMAN | pre | 4 | −1.07 | 0.00896522 | P13501 | CCL5 | C-C motif |
| | | | | | | | | | chemokine 5 |
| 25 | 64 | CD14_HUMAN | pre | 4 | −0.87 | 0.00975827 | P08571 | CD14 | Monocyte |
| | | | | | | | | | differentiation |
| | | | | | | | | | antigen CD14 |
| 26 | 65 | CRLF2_HUMAN | pre | 4 | −1.08 | 0.00866136 | Q9HC73 | CRLF2 | Cytokine |
| | | | | | | | | | receptor-like |
| | | | | | | | | | factor 2 |
| | | | diag | 3 | 1.01 | 0.01848700 | | | |
| | 66 | Isoform 2 of | | | | | Q9HC73-2 | | |
| | | CRLF2_HUMAN | | | | | | | |
| | 67 | Isoform 3 of | | | | | Q9HC73-3 | | |
| | | CRLF2_HUMAN | | | | | | | |
| 27 | 68 | LMNB1_HUMAN | pre | 4 | −0.78 | 0.00041269 | P20700 | LMNB1 | Lamin-B1 |
| 28 | 69 | P53_HUMAN | pre | 4 | 0.81 | 0.00173864 | P04637 | TP53 | Cellular tumor |
| | | | | | | | | | antigen p53 |
| | 70 | Isoform 2 of | | | | | P04637-2 | | |
| | | P53_HUMAN | | | | | | | |
| | 71 | Isoform 3 of | | | | | P04637-3 | | |
| | | P53_HUMAN | | | | | | | |
| | 72 | Isoform 4 of | | | | | P04637-4 | | |
| | | P53_HUMAN | | | | | | | |
| | 73 | Isoform 5 of | | | | | P04637-5 | | |
| | | P53_HUMAN | | | | | | | |
| | 74 | Isoform 6 of | | | | | P04637-6 | | |
| | | P53_HUMAN | | | | | | | |
| | 75 | Isoform 7 of | | | | | P04637-7 | | |
| | | P53_HUMAN | | | | | | | |
| | 76 | Isoform 8 of | | | | | P04637-8 | | |
| | | P53_HUMAN | | | | | | | |
| | 77 | Isoform 9 of | | | | | P04637-9 | | |
| | | P53_HUMAN | | | | | | | |
| 29 | 78 | PAK1_HUMAN | pre | 4 | −0.74 | 0.00901111 | Q13153 | PAK1 | Serine/threonine- |
| | | | | | | | | | protein kinase |
| | | | | | | | | | PAK 1 |
| | 79 | Isoform 2 of | | | | | Q13153-2 | | |
| | | PAK1_HUMAN | | | | | | | |
| 30 | 80 | CASP9_HUMAN | diag | 4 | 1.26 | 0.01917485 | P55211 | CASP9 | Caspase-9 |
| | 81 | Isoform 2 of | | | | | P55211-2 | | |
| | | CASP9_HUMAN | | | | | | | |
| | 82 | Isoform 3 of | | | | | P55211-3 | | |
| | | CASP9_HUMAN | | | | | | | |
| | 83 | Isoform 4 of | | | | | P55211-4 | | |
| | | CASP9_HUMAN | | | | | | | |
| 31 | 84 | BGH3_HUMAN | pre | 3 | −0.79 | 0.00768649 | Q15582 | TGFBI | Transforming |
| | | | | | | | | | growth factor- |
| | | | | | | | | | beta-induced |
| | | | | | | | | | protein ig-h3 |
| 32 | 85 | CD47_HUMAN | pre | 3 | −0.54 | 0.00118575 | Q08722 | CD47 | Leukocyte |
| | | | | | | | | | surface antigen |
| | | | | | | | | | CD47 |
| | 86 | Isoform OA3-293 | | | | | Q08722-2 | | |
| | | of CD47_HU- | | | | | | | |
| | | MAN | | | | | | | |
| | 87 | Isoform OA3-305 | | | | | Q08722-3 | | |
| | | of CD47_HU- | | | | | | | |
| | | MAN | | | | | | | |
| | 88 | Isoform OA3-312 | | | | | Q08722-4 | | |
| | | of CD47_HU- | | | | | | | |
| | | MAN | | | | | | | |
| 33 | 89 | CD8A_HUMAN | pre | 3 | −0.93 | 0.02217931 | P01732 | CD8A | T-cell surface gly- |
| | | | | | | | | | coprotein CD8 al- |
| | | | | | | | | | pha chain |
| | 90 | Isoform 2 of | | | | | P01732-2 | | |
| | | CD8A_HUMAN | | | | | | | |
| | 91 | Isoform 3 of | | | | | P01732-3 | | |
| | | CD8A_HUMAN | | | | | | | |
| 34 | 92 | DKK3_HUMAN | pre | 3 | −0.77 | 0.03511896 | Q9UBP4 | DKK3 | Dickkopf-related |
| | | | | | | | | | protein 3 |
| 35 | 93 | GAS6_HUMAN | pre | 3 | −0.83 | 0.01370348 | Q14393 | GAS6 | Growth arrest- |
| | | | | | | | | | specific protein 6 |
| | | | diag | 2 | 0.79 | 0.01633199 | | | |
| | 94 | isoform 2 of | | | | | Q14393-1 | | |
| | | GAS6_HUMAN | | | | | | | |
| | 95 | Isoform 3 of | | | | | Q14393-3 | | |
| | | GAS6_HUMAN | | | | | | | |
| | 96 | Isoform 4 of | | | | | Q14393-4 | | |
| | | GAS6_HUMAN | | | | | | | |
| | 97 | Isoform 5 of | | | | | Q14393-5 | | |
| | | GAS6_HUMAN | | | | | | | |
| 36 | 98 | IL15_HUMAN | pre | 3 | −0.94 | 0.01585528 | P40933 | IL15 | Interleukin-15 |
| | | | diag | 3 | 1.08 | 0.01242697 | | | |
| | 99 | Isoform IL15- | | | | | P40933-2 | | |
| | | S21AA of | | | | | | | |
| | | IL15_HUMAN | | | | | | | |
| 37 | 100 | IL3RB_HUMAN | pre | 3 | −0.80 | 0.01834127 | P32927 | CSF2RB | Cytokine recep- |
| | | | | | | | | | tor common sub- |
| | | | | | | | | | unit beta |
| | 101 | Isoform 2 | | | | | P32927-2 | | |
| | | ofIL3RB_HUMAN | | | | | | | |
| 38 | 102 | K2C8_HUMAN | pre | 3 | 0.97 | 0.03749303 | P05787 | KRT8 | Keratin, type II |
| | | | | | | | | | cytoskeletal 8 |
| | 103 | Isoform 2 of | | | | | P05787-2 | | |
| | | K2C8_HUMAN | | | | | | | |
| 39 | 104 | LEUK_HUMAN | | 3 | −0.59 | 0.00095308 | P16150 | SPN | Leukosialin |
| 40 | 105 | MARK4_HUMAN | pre | 3 | −0.79 | 0.00167421 | Q96L34 | MARK4 | MAP/microtu- |
| | | | | | | | | | bule affinity-reg- |
| | | | | | | | | | ulating kinase 4 |
| | 106 | Isoform 2 of | | | | | Q96L34-2 | | |
| | | MARK4_HUMAN | | | | | | | |
| 41 | 107 | MELPH_HUMAN | pre | 3 | −0.76 | 0.03511896 | Q9BV36 | MLPH | Melanophilin |
| | 108 | isoform 2 of | | | | | Q9BV36-2 | | |
| | | MELPH_HUMAN | | | | | | | |
| | 109 | Isoform 3 of | | | | | Q9BV36-3 | | |
| | | MELPH_HUMAN | | | | | | | |
| | 110 | Isoform 4 of | | | | | Q9BV36-4 | | |
| | | MELPH_HUMAN | | | | | | | |
| | 111 | isoform 5 of | | | | | Q9BV36-5 | | |
| | | MELPH_HUMAN | | | | | | | |
| 42 | 112 | MMP1_HUMAN | pre | 3 | −0.59 | 0.00208582 | P03956 | MMP1 | Interstitial |
| | | | | | | | | | collagenase |
| | | | diag | 2 | 0.71 | 0.01633199 | | | |
| 43 | 113 | MMP7_HUMAN | pre | 3 | −0.96 | 0.03511896 | P09237 | MMP7 | Matrilysin |
| 44 | 114 | PGH1_HUMAN | pre | 3 | −0.81 | 0.00801786 | P23219 | PTGS1 | Prostaglandin |
| | | | | | | | | | G/H synthase 1 |
| | 115 | Isoform 2 of | | | | | P23219-2 | | |
| | | PGH1_HUMAN | | | | | | | |
| | 116 | Isoform 3 of | | | | | P23219-3 | | |
| | | PGH1_HUMAN | | | | | | | |
| | 117 | Isoform 4 of | | | | | P23219-4 | | |
| | | PGH1_HUMAN | | | | | | | |
| | 118 | Isoform 5 of | | | | | P23219-5 | | |
| | | PGH1_HUMAN | | | | | | | |
| | 119 | Isoform 6 of | | | | | P23219-6 | | |
| | | PGH1_HUMAN | | | | | | | |
| 45 | 120 | PRTN3_HUMAN | pre | 3 | −0.76 | 0.02563658 | P24158 | PRTN3 | Myeloblastin |
| 46 | 121 | RBM3_HUMAN | pre | 3 | −0.88 | 0.00173864 | P98179 | RBM3 | RNA-binding |
| | | | | | | | | | protein 3 |
| | | | diag | 3 | 0.96 | 0.01754186 | | | |
| 47 | 122 | SAMP_HUMAN | pre | 3 | 1.60 | 0.04927846 | P02743 | APCS | Serum amyloid P- |
| | | | | | | | | | component |
| 48 | 123 | TSN16_HUMAN | pre | 3 | −0.95 | 0.01860133 | Q9UKR8 | TSPAN16 | Tetraspanin-16 |
| | 124 | Isoform 2 of | | | | | Q9UKR8-2 | | |
| | | TSN16_HUMAN | | | | | | | |
| | 125 | Isoform 3 of | | | | | Q9UKR8-3 | | |
| | | TSN16_HUMAN | | | | | | | |
| | 126 | Isoform 4 of | | | | | Q9UKR8-4 | | |
| | | TSN16_HUMAN | | | | | | | |
| 49 | 127 | UROK_HUMAN | pre | 3 | 1.05 | 0.01289580 | P00749 | PLAU | Urokinase-type |
| | | | | | | | | | plasminogen |
| | | | | | | | | | activator |
| | 128 | Isoform 2 of | | | | | P00749-2 | | |
| | | UROK_HUMAN | | | | | | | |
| 50 | 129 | PYRG1_HUMAN | diag | 3 | 1.03 | 0.04367345 | P17812 | CTPS1 | CTP synthase 1 |
| | 130 | Isoform 2 of | | | | | P17812-2 | | |
| | | PYRG1_HUMAN | | | | | | | |
| 51 | no ID | CD139 | diag | 3 | −1.22 | 0.03468974 | no entry | CD139 | |
| 52 | 131 | MAD4_HUMAN | diag | 3 | 1.09 | 0.01633199 | Q14582 | MXD4 | Max dimerization |
| | | | | | | | | | protein 4 |
| 53 | 132 | TMM54_HUMAN | diag | 3 | 0.80 | 0.01242697 | Q969K7 | TMEM54 | Transmembrane |
| | | | | | | | | | protein 54 |
| | 133 | Isoform 2 of | | | | | Q969K7-2 | | |
| | | TMM54_HUMAN | | | | | | | |
| | 134 | Isoform 3 of | | | | | Q969K7-3 | | |
| | | TMM54_HUMAN | | | | | | | |
| 54 | 135 | ACTB_HUMAN | pre | 2 | −0.66 | 0.01989421 | P60709 | ACTB | Actin, |
| | | | | | | | | | cytoplasmic 1 |
| 55 | 136 | CASP3_HUMAN | pre | 2 | −0.77 | 0.01672936 | P42574 | CASP3 | Caspase-3 |
| 56 | 137 | DAF_HUMAN | pre | 2 | 0.51 | 0.02261542 | P08174 | CD55 | Complement |
| | | | | | | | | | decay- |
| | | | | | | | | | accelerating |
| | | | | | | | | | factor |
| | 138 | Isoform 1 of | | | | | P08174-2 | | |
| | | DAF_HUMAN | | | | | | | |
| | 139 | Isoform 3 of | | | | | P08174-3 | | |
| | | DAF_HUMAN | | | | | | | |
| | 140 | Isoform 4 of | | | | | P08174-4 | | |
| | | DAF_HUMAN | | | | | | | |
| | 141 | Isoform 5 of | | | | | P08174-5 | | |
| | | DAF_HUMAN | | | | | | | |
| | 142 | Isoform 6 of | | | | | P08174-6 | | |
| | | DAF_HUMAN | | | | | | | |
| | 143 | Isoform 7 of | | | | | P08174-7 | | |
| | | DAF_HUMAN | | | | | | | |
| 57 | 144 | HMGB2_HUMAN | pre | 2 | 0.72 | 0.03511896 | P26583 | HMGB2 | High mobility |
| | | | | | | | | | group protein B2 |
| 58 | 145 | HXC11_HUMAN | pre | 2 | 0.91 | 0.03511896 | O43248 | HOXC11 | Homeobox |
| | | | | | | | | | protein Hox-C11 |
| 59 | 146 | ICAM1_HUMAN | pre | 2 | 0.71 | 0.02564186 | P05362 | ICAM1 | Intercellular |
| | | | | | | | | | adhesion |
| | | | | | | | | | molecule 1 |
| 60 | 147 | IL12A_HUMAN | pre | 2 | −0.71 | 0.03511896 | P29459 | IL12A | Interleukin-12 |
| | | | | | | | | | subunit alpha |
| 61 | 148 | KLF8_HUMAN | pre | 2 | −0.67 | 0.01886910 | O95600 | KLF8 | Krueppel-like |
| | | | | | | | | | factor 8 |
| | | | diag | 2 | −0.93 | 0.04479542 | | | |
| | 149 | Isoform 2 of | | | | | O95600-3 | | |
| | | KLF8_HUMAN | | | | | | | |
| | 150 | Isoform 3 of | | | | | O95600-4 | | |
| | | KLF8_HUMAN | | | | | | | |
| | 151 | Isoform 4 of | | | | | O95600-5 | | |
| | | KLF8_HUMAN | | | | | | | |
| 62 | 152 | LEG4_HUMAN | pre | 2 | −0.80 | 0.03511896 | P56470 | LGALS4 | Galectin-4 |
| 63 | 153 | LTOR1_HUMAN | pre | 2 | 0.83 | 0.04600786 | Q6IAA8 | LAMTOR1 | Ragulator |
| | | | | | | | | | complex protein |
| | | | | | | | | | LAMTOR1 |
| 64 | 154 | LYAM1_HUMAN | pre | 2 | −0.62 | 0.03226915 | P14151 | SELL | L-selectin |
| | 155 | Isoform 2 of | | | | | P14151-2 | | |
| | | LYAM1_HUMAN | | | | | | | |
| 65 | 156 | MK03_HUMAN | pre | 2 | −0.77 | 0.01886910 | P27361 | MAPK3 | Mitogen- |
| | | | | | | | | | activated protein |
| | | | | | | | | | kinase 3 |
| | 157 | Isoform 2 of | | | | | P27361-2 | | |
| | | MK03_HUMAN | | | | | | | |
| | 158 | Isoform 3 of | | | | | P27361-3 | | |
| | | MK03_HUMAN | | | | | | | |
| 66 | 159 | MUC5B_HUMAN | pre | 2 | −0.80 | 0.02047452 | Q9HC84 | MUC5B | Mucin-5B |
| 67 | 160 | NFAC4_HUMAN | pre | 2 | −0.50 | 0.01281061 | Q14934 | NFATC4 | Nuclear factor of |
| | | | | | | | | | activated T-cells |
| | 161 | Isoform 2 of | | | | | Q14934-2 | | |
| | | NFAC4_HUMAN | | | | | | | |
| | 162 | Isoform 3 of | | | | | Q14934-3 | | |
| | | NFAC4_HUMAN | | | | | | | |
| | 163 | Isoform 4 of | | | | | Q14934-4 | | |
| | | NFAC4_HUMAN | | | | | | | |
| | 164 | Isoform 5 of | | | | | Q14934-5 | | |
| | | NFAC4_HUMAN | | | | | | | |
| | 165 | Isoform 6 of | | | | | Q14934-6 | | |
| | | NFAC4_HUMAN | | | | | | | |
| | 166 | Isoform 7 of | | | | | Q14934-7 | | |
| | | NFAC4_HUMAN | | | | | | | |
| | 167 | Isoform 8 of | | | | | Q14934-8 | | |
| | | NFAC4_HUMAN | | | | | | | |
| | 168 | Isoform 9 of | | | | | Q14934-9 | | |
| | | NFAC4_HUMAN | | | | | | | |
| | 169 | Isoform 10 of | | | | | Q14934- | | |
| | | NFAC4_HUMAN | | | | | 10 | | |
| | 170 | Isoform 11 of | | | | | Q14934- | | |
| | | NFAC4_HUMAN | | | | | 11 | | |
| | 171 | Isoform 12 of | | | | | Q14934- | | |
| | | NFAC4_HUMAN | | | | | 12 | | |
| | 172 | Isoform 13 of | | | | | Q14934- | | |
| | | NFAC4_HUMAN | | | | | 13 | | |
| | 173 | Isoform 14 of | | | | | Q14934- | | |
| | | NFAC4_HUMAN | | | | | 14 | | |
| | 174 | Isoform 15 of | | | | | Q14934- | | |
| | | NFAC4_HUMAN | | | | | 15 | | |
| | 175 | Isoform 16 of | | | | | Q14934- | | |
| | | NFAC4_HUMAN | | | | | 16 | | |
| | 176 | Isoform 17 of | | | | | Q14934- | | |
| | | NFAC4_HUMAN | | | | | 17 | | |
| | 177 | Isoform 18 of | | | | | Q14934- | | |
| | | NFAC4_HUMAN | | | | | 18 | | |
| | 178 | Isoform 19 of | | | | | Q14934- | | |
| | | NFAC4_HUMAN | | | | | 19 | | |
| | 179 | Isoform 20 of | | | | | Q14934- | | |
| | | NFAC4_HUMAN | | | | | 20 | | |
| | 180 | Isoform 21 of | | | | | Q14934- | | |
| | | NFAC4_HUMAN | | | | | 21 | | |
| | 181 | isoform 22 of | | | | | Q14934- | | |
| | | NFAC4_HUMAN | | | | | 22 | | |
| | 182 | Isoform 23 of | | | | | Q14934- | | |
| | | NFAC4_HUMAN | | | | | 23 | | |
| | 183 | Isoform 24 of | | | | | Q14934- | | |
| | | NFAC4_HUMAN | | | | | 24 | | |
| 68 | 184 | TGFB1_HUMAN | pre | 2 | 0.81 | 0.02912596 | P01137 | TGFB1 | Transforming |
| | | | | | | | | | growth factor |
| | | | | | | | | | beta-1 propro- |
| | | | | | | | | | tein |
| 69 | 185 | VRK1_HUMAN | pre | 2 | −0.87 | 0.04772231 | Q99986 | VRK1 | Serine/threonine- |
| | | | | | | | | | protein kinase |
| | | | | | | | | | VRK1 |
| 70 | 186 | CDKN3_HUMAN | diag | 2 | −0.71 | 0.01978279 | Q16667 | CDKN3 | Cyclin-dependent |
| | | | | | | | | | kinase inhibitor 3 |
| | 187 | Isoform 2 of | | | | | Q16667-2 | | |
| | | CDKN3_HUMAN | | | | | | | |
| 71 | 188 | TFPI2_HUMAN | diag | 2 | −0.79 | 0.03075045 | P48307 | TFPI2 | Tissue factor |
| | | | | | | | | | pathway inhibitor |
| | | | | | | | | | 2 |
| | 189 | Isoform 2 of | | | | | P48307-2 | | |
| | | TFPI2_HUMAN | | | | | | | |
| 72 | 190 | MLP3B_HUMAN | diag | 2 | 0.99 | 0.01633199 | Q9GZQ8 | MAP1LC3B | Microtubule-as- |
| | | | | | | | | | sociated proteins |
| | | | | | | | | | 1A/1B light chain |
| | | | | | | | | | 3B |
| 73 | 191 | PTEN_HUMAN | diag | 2 | 0.93 | 0.01633199 | P60484 | PTEN | Phosphatidylino- |
| | | | | | | | | | sitol 3,4,5- |
| | | | | | | | | | trisphosphate 3- |
| | | | | | | | | | phosphatase and |
| | | | | | | | | | dual-specificity |
| | | | | | | | | | protein phospha- |
| | | | | | | | | | tase PTEN |
| | 192 | Isoform alpha of | | | | | P60484-2 | | |
| | | PTEN_HUMAN | | | | | | | |
| | 193 | Isoform 3 of | | | | | P60484-3 | | |
| | | PTEN_HUMAN | | | | | | | |
| 74 | 194 | IL8_HUMAN | pre | 2 | −0.83 | 0.03511896 | P10145 | CXCL8 | Interleukin-8 |
| 75 | 195 | ARHG2_HUMAN | pre | 1 | −0.41 | 0.03565782 | Q92974 | ARHGEF2 | Rho guanine nu- |
| | | | | | | | | | cleotide ex- |
| | | | | | | | | | change factor 2 |
| | 196 | Isoform 2 of | | | | | Q92974-2 | | |
| | | ARHG2_HUMAN | | | | | | | |
| | 197 | Isoform 3 of | | | | | Q92974-3 | | |
| | | ARHG2_HUMAN | | | | | | | |
| 76 | 198 | CFLAR_HUMAN | pre | 1 | 0.52 | 0.03006471 | O15519 | CFLAR | CASP8 and FADD- |
| | | | | | | | | | like apoptosis |
| | | | | | | | | | regulator |
| | 199 | Isoform 2 of | | | | | O15519-2 | | |
| | | CFLAR_HUMAN | | | | | | | |
| | 200 | Isoform 3 of | | | | | O15519-3 | | |
| | | CFLAR_HUMAN | | | | | | | |
| | 201 | Isoform 4 of | | | | | O15519-4 | | |
| | | CFLAR_HUMAN | | | | | | | |
| | 202 | Isoform 5 of | | | | | O15519-5 | | |
| | | CFLAR_HUMAN | | | | | | | |
| | 203 | Isoform 6 of | | | | | O15519-6 | | |
| | | CFLAR_HUMAN | | | | | | | |
| | 204 | isoform 7 of | | | | | O15519-7 | | |
| | | CFLAR_HUMAN | | | | | | | |
| | 205 | Isoform 8 of | | | | | O15519-8 | | |
| | | CFLAR_HUMAN | | | | | | | |
| | 206 | Isoform 9 of | | | | | O15519-9 | | |
| | | CFLAR_HUMAN | | | | | | | |
| | 207 | Isoform 10 of | | | | | O15519- | | |
| | | CFLAR_HUMAN | | | | | 10 | | |
| | 208 | Isoform 11 of | | | | | O15519- | | |
| | | CFLAR_HUMAN | | | | | 11 | | |
| | 209 | Isoform 12 of | | | | | O15519- | | |
| | | CFLAR_HUMAN | | | | | 12 | | |
| | 210 | isoform 13 of | | | | | O15519- | | |
| | | CFLAR_HUMAN | | | | | 13 | | |
| | 211 | Isoform 14 of | | | | | O15519- | | |
| | | CFLAR_HUMAN | | | | | 14 | | |
| | 212 | Isoform 15 of | | | | | O15519- | | |
| | | CFLAR_HUMAN | | | | | 15 | | |
| 77 | 213 | CUED2_HUMAN | pre | 1 | −0.70 | 0.01007946 | Q9H467 | CUEDC2 | CUE domain- |
| | | | | | | | | | containing |
| | | | | | | | | | protein 2 |
| 78 | 214 | DAPK1_HUMAN | pre | 1 | −0.65 | 0.02261542 | P53355 | DAPK1 | Death-associated |
| | | | | | | | | | protein kinase 1 |
| | 215 | Isoform 2 of | | | | | P53355-2 | | |
| | | DAPK1_HUMAN | | | | | | | |
| | 216 | Isoform 3 of | | | | | P53355-3 | | |
| | | DAPK1_HUMAN | | | | | | | |
| | 217 | Isoform 4 of | | | | | P53355-4 | | |
| | | DAPK1_HUMAN | | | | | | | |
| 79 | 218 | EDNRA_HUMAN | pre | 1 | 0.58 | 0.02900873 | P25101 | EDNRA | Endothelin-1 |
| | | | | | | | | | receptor |
| | 219 | Isoform 2 of | | | | | P25101-2 | | |
| | | EDNRA_HUMAN | | | | | | | |
| | 220 | Isoform 3 of | | | | | P25101-3 | | |
| | | EDNRA_HUMAN | | | | | | | |
| | 221 | Isoform 4 of | | | | | P25101-4 | | |
| | | EDNRA_HUMAN | | | | | | | |
| | 222 | Isoform 5 of | | | | | P25101-5 | | |
| | | EDNRA_HUMAN | | | | | | | |
| 80 | 223 | EIF3B_HUMAN | pre | 1 | 0.69 | 0.01829644 | P55884 | EIF3B | Eukaryotic trans- |
| | | | | | | | | | lation initiation |
| | | | | | | | | | factor 3 subunit B |
| | 224 | Isoform 2 of | | | | | P55884-2 | | |
| | | EIF3B_HUMAN | | | | | | | |
| 81 | 225 | ID2_HUMAN | pre | 1 | 0.32 | 0.03707986 | Q02363 | ID2 | DNA-binding |
| | | | | | | | | | protein inhibitor |
| | | | | | | | | | ID-2 |
| 82 | 226 | LMNA_HUMAN | pre | 1 | −0.63 | 0.03353007 | P02545 | LMNA | Prelamin-A/C |
| | 227 | Isoform C of | | | | | P02545-2 | | |
| | | LMNA_HUMAN | | | | | | | |
| | 228 | Isoform | | | | | P02545-3 | | |
| | | ADelta10 of | | | | | | | |
| | | LMNA_HUMAN | | | | | | | |
| | 229 | Isoform 4 of | | | | | P02545-4 | | |
| | | LMNA_HUMAN | | | | | | | |
| | 230 | Isoform 5 of | | | | | P02545-5 | | |
| | | LMNA_HUMAN | | | | | | | |
| | 231 | Isoform 6 of | | | | | P02545-6 | | |
| | | LMNA_HUMAN | | | | | | | |
| 83 | 232 | PYR1_HUMAN | pre | 1 | −0.65 | 0.01284425 | P27708 | CAD | CAD protein |
| 84 | 233 | ZN593_HUMAN | pre | 1 | 0.62 | 0.01284425 | O00488 | ZNF593 | Zinc finger |
| | | | | | | | | | protein 593 |
| 85 | 234 | MK12_HUMAN | diag | 1 | 0.69 | 0.04367345 | P53778 | MAPK12 | Mitogen- |
| | | | | | | | | | activated protein |
| | | | | | | | | | kinase 12 |
| | 235 | Isoform 2 of | | | | | P53778-2 | | |
| | | MK12_HUMAN | | | | | | | |
| 86 | 236 | CP1B1_HUMAN | diag | 1 | −0.56 | 0.01978279 | Q16678 | CYP1B1 | Cytochrome P450 |
| | | | | | | | | | 1B1 |
| 87 | 237 | ANGT_HUMAN | | 0 | −0.42 | 0.04109223 | P01019 | AGT | Angiotensinogen |
| 88 | 238 | APC_HUMAN | pre | 0 | −0.42 | 0.02825626 | P25054 | APC | Adenomatous |
| | | | | | | | | | polyposis coli |
| | | | | | | | | | protein |
| | 239 | Isoform 2 of | | | | | P25054-2 | | |
| | | APC_HUMAN | | | | | | | |
| | 240 | Isoform 1B of | | | | | P25054-3 | | |
| | | APC_HUMAN | | | | | | | |
| 89 | 241 | PO2F1_HUMAN | pre | 0 | 0.31 | 0.02825626 | P14859 | POU2F1 | POU domain, |
| | | | | | | | | | class 2, transcrip- |
| | | | | | | | | | tion factor 1 |
| | 242 | Isoform 2 of | | | | | P14859-2 | | |
| | | PO2F1_HUMAN | | | | | | | |
| | 243 | Isoform 3 of | | | | | P14859-3 | | |
| | | PO2F1_HUMAN | | | | | | | |
| | 244 | Isoform 6 of | | | | | P14859-6 | | |
| | | PO2F1_HUMAN | | | | | | | |
| | 245 | Isoform 4 of | | | | | P14859-4 | | |
| | | PO2F1_HUMAN | | | | | | | |
| | 246 | Isoform 5 of | | | | | P14859-5 | | |
| | | PO2F1_HUMAN | | | | | | | |
| 90 | 247 | SSR4_HUMAN | pre | 0 | −0.40 | 0.02825626 | P31391 | SSTR4 | Somatostatin |
| | | | | | | | | | receptor type 4 |
| 91 | 248 | TNAP3_HUMAN | pre | 0 | −0.49 | 0.03707986 | P21580 | TNFAIP3 | Tumor necrosis |
| | | | | | | | | | factor alpha-in- |
| | | | | | | | | | duced protein 3 |
| 92 | 249 | TRI22_HUMAN | diag | 0 | 0.44 | 0.04624814 | Q81YM9 | TRIM22 | E3 ubiquitin- |
| | | | | | | | | | protein ligase |
| | | | | | | | | | TRIM22 |
| | 250 | Isoform 2 of | | | | | Q8IYM9-2 | | |
| | | TRI22_HUMAN | | | | | | | |

[0420] The biomarkers of the present invention were identified by binding to immobilized antibodies, except ligands of the Tumor necrosis factor receptor superfamily member 1B (Marker No. 5 in Table 1, Marker No. 4 in Table 2, Marker No. 5 in Table 6). Here, an immobilized Fc-Tumor necrosis factor receptor superfamily member 1B-fusion protein was used for capturing ligands of this receptor including Tumor necrosis factor and Lymphotoxin-alpha.

[0421] “Qual score” indicates a quality score that takes into account log FC-values, adjusted p-values as well as stripcharts (graphical representations of differential abundance distribution as well as discrimination power).

[0422] Log FC-values and adjusted p-values are shown in Table 1 as well. Positive log FC-values indicate that the respective biomarker is upregulated in AKI patients as compared to patients without AKI. Negative log FC-values indicate that the respective biomarker is downregulated in AKI patients as compared to patients without AKI.

[0423] The Uniprot entry name and the Uniprot accession number are indicated if applicable. Not all biomarkers of the invention are proteins so that not every biomarker has a UniProt entry.

[0424] Table 1, Table 5 and Table 6 comprise a combination of predictive and diagnostic biomarkers, Table 4 comprises biomarkers identified as predictive as well as diagnostic. Biomarkers identified in the predictive assay are indicated by “pre”, biomarkers identified in the diagnostic assay are indicated by “diag” within these tables.

[0425] Table 2 shows 78 predictive biomarkers of the present invention.

TABLE 2

| | SEQ ID | Uniprot entry | Qual | | | Uniprot | Gene | |
|---|---|---|---|---|---|---|---|---|
| No. | NO | name | score | logFC | adj. p-Val | accession | name | Protein name |
| 1 | no ID | CD15 (no entry, | 6 | −0.86 | 0.00000004 | no entry | CD15 | |
| | | no protein) | | | | | | |
| 2 | 2 | CD99_HUMAN | 6 | −0.98 | 0.00000440 | P14209 | CD99 | CD99 antigen |
| | 3 | Isoform II of | | | | P14209-2 | | |
| | | CD99_HUMAN | | | | | | |
| | 4 | Isoform 3 of | | | | P14209-3 | | |
| | | CD99_HUMAN | | | | | | |
| 3 | 5 | FCERA_HUMAN | 6 | −1.63 | 0.00049891 | P12319 | FCER1A | High affinity immuno- |
| | | | | | | | | globulin epsilon |
| | | | | | | | | receptor subunit alpha |
| 4 | 251- | No entry | 6 | −1.60 | 0.00000083 | P01375 | TNF and | Ligands of Tumor |
| | 252 | (Ligands of | | | | and | LTA | necrosis factor receptor |
| | | TNR1B_HUMAN | | | | P01374 | | superfamily member |
| | | including | | | | | | 1B including Tumor |
| | | TNFA_HUMAN | | | | | | necrosis factor and |
| | | and TNFB_HUMAN) | | | | | | Lymphotoxin-alpha |
| 5 | 6 | TNR6_HUMAN | 6 | −1.32 | 0.00003060 | P25445 | FAS | Tumor necrosis factor |
| | | | | | | | | receptor superfamily |
| | | | | | | | | member 6 |
| | 7 | Isoform 2 of | | | | P25445-2 | | |
| | | TNR6_Human | | | | | | |
| | 8 | Isoform 3 of | | | | P25445-3 | | |
| | | TNR6_Human | | | | | | |
| | 9 | Isoform 4 of | | | | P25445-4 | | |
| | | TNR6_Human | | | | | | |
| | 10 | Isoform 5 of | | | | P25445-5 | | |
| | | TNR6_Human | | | | | | |
| | 11 | Isoform 6 of | | | | P25445-6 | | |
| | | TNR6_Human | | | | | | |
| | 12 | Isoform 7 of | | | | P25445-7 | | |
| | | TNR6_Human | | | | | | |
| 6 | 14 | BASI_HUMAN | 5 | −1.00 | 0.00456896 | P35613 | BSG | Basigin |
| | 15 | Isoform 2 of | | | | P35613-2 | | |
| | | BASI_Human | | | | | | |
| | 16 | Isoform 3 of | | | | P35613-3 | | |
| | | BASI_Human | | | | | | |
| | 17 | Isoform 4 of | | | | P35613-4 | | |
| | | BASI_Human | | | | | | |
| 7 | 18 | CCL7_HUMAN | 5 | −0.82 | 0.00082227 | P80098 | CCL7 | C—C motif chemokine 7 |
| 8 | 19 | CD9_HUMAN | 5 | −0.78 | 0.00077460 | P21926 | CD9 | CD9 antigen |
| 9 | 20 | DKK2_HUMAN | 5 | −0.78 | 0.00077460 | Q9UBU2 | DKK2 | Dickkopf-related |
| | | | | | | | | protein 2 |
| 10 | 21 | HMMR_HUMAN | | | | O75330-1 | HMMR | Hyaluronan mediated |
| | | | | | | | | motility receptor |
| | 22 | Isoform 2 of | 5 | −1.02 | 0.00743181 | O75330-2 | | |
| | | HMMR_HUMAN | | | | | | |
| | 23 | Isoform 3 of | | | | O75330-3 | | |
| | | HMMR_HUMAN | | | | | | |
| | 24 | Isoform 4 of | | | | O75330-4 | | |
| | | HMMR_HUMAN | | | | | | |
| 11 | 25 | IL18_HUMAN | 5 | −1.03 | 0.00709074 | Q14116 | IL18 | Interleukin-18 |
| | 26 | Isoform 2 of | | | | | | |
| | | IL18_HUMAN | | | | | | |
| 12 | 27 | IL7_HUMAN | 5 | −0.98 | 0.00077460 | P13232 | IL7 | Interleukin-7 |
| | 28 | Isoform 2 of | | | | P13232-2 | | |
| | | IL7_HUMAN | | | | | | |
| | 29 | Isoform 3 of | | | | P13232-3 | | |
| | | IL7_HUMAN | | | | | | |
| 13 | 30 | PRIO_HUMAN | 5 | −0.95 | 0.00077460 | P04156 | PRNP | Major prion protein |
| 14 | 31 | PTPRC_HUMAN | 5 | −0.93 | 0.00021371 | P08575 | PTPRC | Receptor-type |
| | | | | | | | | tyrosine-protein |
| | | | | | | | | phosphatase C |
| | 32 | Isoform 2 of | | | | P08575-4 | | |
| | | PTPRC_HUMAN | | | | | | |
| | 33 | Isoform 3 of | | | | P08575-5 | | |
| | | PTPRC_HUMAN | | | | | | |
| | 34 | Isoform 4 of | | | | P08575-6 | | |
| | | PTPRC_HUMAN | | | | | | |
| | 35 | Isoform 5 of | | | | P08575-7 | | |
| | | PTPRC_HUMAN | | | | | | |
| | 36 | Isoform 6 of | | | | P08575-8 | | |
| | | PTPRC_HUMAN | | | | | | |
| | 37 | Isoform 7 of | | | | P08575-9 | | |
| | | PTPRC_HUMAN | | | | | | |
| | 38 | Isoform 8 of | | | | P08575-10 | | |
| | | PTPRC_HUMAN | | | | | | |
| 15 | 39 | SELPL_HUMAN | 5 | −0.96 | 0.00020190 | Q14242 | SELPLG | P-selectin glycoprotein |
| | | | | | | | | ligand 1 |
| | 40 | Isoform 2 of | | | | Q14242-2 | | |
| | | SELPL_HUMAN | | | | | | |
| 16 | 41 | TNF14_HUMAN | 5 | −1.23 | 0.00896522 | O43557 | TNFSF14 | Tumor necrosis factor |
| | | | | | | | | ligand superfamily |
| | | | | | | | | member 14 |
| | 42 | Isoform 2 of | | | | O43557-2 | | |
| | | TNF14_HUMAN | | | | | | |
| 17 | 43 | TOP2A_HUMAN | 5 | −0.88 | 0.00077460 | P11388 | TOP2A | DNA topoisomerase 2- |
| | | | | | | | | alpha |
| | 44 | Isoform 2 of | | | | P11388-2 | | |
| | | TOP2A_HUMAN | | | | | | |
| | 45 | Isoform 3 of | | | | P11388-3 | | |
| | | TOP2A_HUMAN | | | | | | |
| | 46 | Isoform 4 of | | | | P11388-4 | | |
| | | TOP2A_HUMAN | | | | | | |
| 18 | 47 | BDNF_HUMAN | 4 | −1.03 | 0.03226915 | P23560 | BDNF | Brain-derived |
| | | | | | | | | neurotrophic factor |
| | 48 | Isoform 2 of | | | | P23560-2 | | |
| | | BDNF_HUMAN | | | | | | |
| | 49 | Isoform 3 of | | | | P23560-3 | | |
| | | BDNF_HUMAN | | | | | | |
| | 50 | Isoform 4 of | | | | P23560-4 | | |
| | | BDNF_HUMAN | | | | | | |
| | 51 | Isoform 5 of | | | | P23560-5 | | |
| | | BDNF_HUMAN | | | | | | |
| 19 | 52 | CASP8_HUMAN | 4 | −0.98 | 0.00743181 | Q14790 | CASP8 | Caspase-8 |
| | 53 | Isoform 2 of | | | | Q14790-2 | | |
| | | CASP8_HUMAN | | | | | | |
| | 54 | Isoform 3 of | | | | Q14790-3 | | |
| | | CASP8_HUMAN | | | | | | |
| | 55 | Isoform 4 of | | | | Q14790-4 | | |
| | | CASP8_HUMAN | | | | | | |
| | 56 | Isoform 5 of | | | | Q14790-5 | | |
| | | CASP8_HUMAN | | | | | | |
| | 57 | Isoform 6 of | | | | Q14790-6 | | |
| | | CASP8_HUMAN | | | | | | |
| | 58 | Isoform 7 of | | | | Q14790-7 | | |
| | | CASP8_HUMAN | | | | | | |
| | 59 | Isoform 8 of | | | | Q14790-8 | | |
| | | CASP8_HUMAN | | | | | | |
| | 60 | Isoform 9 of | | | | Q14790-9 | | |
| | | CASP8_HUMAN | | | | | | |
| 20 | 61 | CCL11_HUMAN | 4 | −0.92 | 0.00743181 | P51671 | CCL11 | Eotaxin |
| 21 | 62 | CCL3_HUMAN | 4 | −1.00 | 0.03040191 | P10147 | CCL3 | C-C motif chemokine 3 |
| 22 | 63 | CCL5_HUMAN | 4 | −1.07 | 0.00896522 | P13501 | CCL5 | C-C motif chemokine 5 |
| 23 | 64 | CD14_HUMAN | 4 | −0.87 | 0.00975827 | P08571 | CD14 | Monocyte |
| | | | | | | | | differentiation antigen |
| | | | | | | | | CD14 |
| 24 | 65 | CRLF2_HUMAN | 4 | −1.08 | 0.00866136 | Q9HC73 | CRLF2 | Cytokine receptor-like |
| | | | | | | | | factor 2 |
| | 66 | Isoform 2 of | | | | Q9HC73-2 | | |
| | | CRLF2_HUMAN | | | | | | |
| | 67 | Isoform 3 of | | | | Q9HC73-3 | | |
| | | CRLF2_HUMAN | | | | | | |
| 25 | 68 | LMNB1_HUMAN | 4 | −0.78 | 0.00041269 | P20700 | LMNB1 | Lamin-B1 |
| 26 | 69 | P53_HUMAN | 4 | 0.81 | 0.00173864 | P04637 | TP53 | Cellular tumor antigen |
| | | | | | | | | p53 |
| | 70 | Isoform 2 of | | | | P04637-2 | | |
| | | P53_HUMAN | | | | | | |
| | 71 | Isoform 3 of | | | | P04637-3 | | |
| | | P53_HUMAN | | | | | | |
| | 72 | Isoform 4 of | | | | P04637-4 | | |
| | | P53_HUMAN | | | | | | |
| | 73 | Isoform 5 of | | | | P04637-5 | | |
| | | P53_HUMAN | | | | | | |
| | 74 | Isoform 6 of | | | | P04637-6 | | |
| | | P53_HUMAN | | | | | | |
| | 75 | Isoform 7 of | | | | P04637-7 | | |
| | | P53_HUMAN | | | | | | |
| | 76 | Isoform 8 of | | | | P04637-8 | | |
| | | P53_HUMAN | | | | | | |
| | 77 | soform 9 of | | | | P04637-9 | | |
| | | P53_HUMAN | | | | | | |
| 27 | 78 | PAK1_HUMAN | 4 | −0.74 | 0.00901111 | Q13153 | PAK1 | Serine/threonine- |
| | | | | | | | | protein kinase PAK 1 |
| | 79 | Isoform 2 of | | | | Q13153-2 | | |
| | | PAK1_HUMAN | | | | | | |
| 28 | 84 | BGH3_HUMAN | 3 | −0.79 | 0.00768649 | Q15582 | TGFBI | Transforming growth |
| | | | | | | | | factor-beta-induced |
| | | | | | | | | protein ig-h3 |
| 29 | 85 | CD47_HUMAN | 3 | −0.54 | 0.00118575 | Q08722 | CD47 | Leukocyte surface |
| | | | | | | | | antigen CD47 |
| | 86 | Isoform OA3-293 | | | | Q08722-2 | | |
| | | of CD47_HUMAN | | | | | | |
| | 87 | Isoform OA3-305 | | | | Q08722-3 | | |
| | | of CD47_HUMAN | | | | | | |
| | 88 | Isoform OA3-312 | | | | Q08722-4 | | |
| | | of CD47_HUMAN | | | | | | |
| 30 | 89 | CD8A_HUMAN | 3 | −0.93 | 0.02217931 | P01732 | CD8A | T-cell surface glyco- |
| | | | | | | | | protein CD8 alpha |
| | | | | | | | | chain |
| | 90 | Isoform 2 of | | | | P01732-2 | | |
| | | CD8A_HUMAN | | | | | | |
| | 91 | Isoform 3 of | | | | P01732-3 | | |
| | | CD8A_HUMAN | | | | | | |
| 31 | 92 | DKK3_HUMAN | 3 | −0.77 | 0.03511896 | Q9UBP4 | DKK3 | Dickkopf-related |
| | | | | | | | | protein 3 |
| 32 | 93 | GAS6_HUMAN | 3 | −0.83 | 0.01370348 | Q14393 | GAS6 | Growth arrest-specific |
| | | | | | | | | protein 6 |
| | 94 | Isoform 2 of | | | | Q14393-1 | | |
| | | GAS6_HUMAN | | | | | | |
| | 95 | Isoform 3 of | | | | Q14393-3 | | |
| | | GAS6_HUMAN | | | | | | |
| | 96 | Isoform 4 of | | | | Q14393-4 | | |
| | | GAS6_HUMAN | | | | | | |
| | 97 | Isoform 5 of | | | | Q14393-5 | | |
| | | GAS6_HUMAN | | | | | | |
| 33 | 13 | IFNA1_HUMAN | 3 | −0.99 | 0.03511896 | P01562 | IFNA1; | Interferon alpha-1/13 |
| | | | | | | | IFNA13 | |
| 34 | 98 | IL15_HUMAN | 3 | −0.94 | 0.01585528 | P40933 | IL15 | Interleukin-15 |
| | 99 | Isoform IL15- | | | | P40933-2 | | |
| | | S21AA of | | | | | | |
| | | IL15_HUMAN | | | | | | |
| 35 | 100 | IL3RB_HUMAN | 3 | −0.80 | 0.01834127 | P32927 | CSF2RB | Cytokine receptor |
| | | | | | | | | common subunit beta |
| | 101 | Isoform 2 of | | | | P32927-2 | | |
| | | IL3RB_HUMAN | | | | | | |
| 36 | 102 | K2C8_HUMAN | 3 | 0.97 | 0.03749303 | P05787 | KRT8 | Keratin, type II |
| | | | | | | | | cytoskeletal 8 |
| | 103 | Isoform 2 of | | | | P05787-2 | | |
| | | K2C8_HUMAN | | | | | | |
| 37 | 104 | LEUK_HUMAN | 3 | −0.59 | 0.00095308 | P16150 | SPN | Leukosialin |
| 38 | 105 | MARK4_HUMAN | 3 | −0.79 | 0.00167421 | Q96L34 | MARK4 | MAP/microtubule |
| | | | | | | | | affinity-regulating |
| | | | | | | | | kinase 4 |
| | 106 | Isoform 2 of | | | | Q96L34-2 | | |
| | | MARK4_HUMAN | | | | | | |
| 39 | 107 | MELPH_HUMAN | 3 | −0.76 | 0.03511896 | Q9BV36 | MLPH | Melanophilin |
| | 108 | Isoform 2 of | | | | Q9BV36-2 | | |
| | | MELPH_HUMAN | | | | | | |
| | 109 | Isoform 3 of | | | | Q9BV36-3 | | |
| | | MELPH_HUMAN | | | | | | |
| | 110 | Isoform 4 of | | | | Q9BV36-4 | | |
| | | MELPH_HUMAN | | | | | | |
| | 111 | Isoform 5 of | | | | Q9BV36-5 | | |
| | | MELPH_HUMAN | | | | | | |
| 40 | 112 | MMP1_HUMAN | 3 | −0.59 | 0.00208582 | P03956 | MMP1 | Interstitial collagenase |
| 41 | 113 | MMP7_HUMAN | 3 | −0.96 | 0.03511896 | P09237 | MMP7 | Matrilysin |
| 42 | 114 | PGH1_HUMAN | 3 | −0.81 | 0.00801786 | P23219 | PTGS1 | Prostaglandin G/H |
| | | | | | | | | synthase 1 |
| | 115 | Isoform 2 of | | | | P23219-2 | | |
| | | PGH1_HUMAN | | | | | | |
| | 116 | Isoform 3 of | | | | P23219-3 | | |
| | | PGH1_HUMAN | | | | | | |
| | 117 | Isoform 4 of | | | | P23219-4 | | |
| | | PGH1_HUMAN | | | | | | |
| | 118 | Isoform 5 of | | | | P23219-5 | | |
| | | PGH1_HUMAN | | | | | | |
| | 119 | Isoform 6 of | | | | P23219-6 | | |
| | | PGH1_HUMAN | | | | | | |
| 43 | 120 | PRTN3_HUMAN | 3 | −0.76 | 0.02563658 | P24158 | PRTN3 | Myeloblastin |
| 44 | 121 | RBM3_HUMAN | 3 | −0.88 | 0.00173864 | P98179 | RBM3 | RNA-binding protein 3 |
| 45 | 122 | SAMP_HUMAN | 3 | 1.60 | 0.04927846 | P02743 | APCS | Serum amyloid P- |
| | | | | | | | | component |
| 46 | 123 | TSN16_HUMAN | 3 | −0.95 | 0.01860133 | Q9UKR8 | TSPAN16 | Tetraspanin-16 |
| | 124 | Isoform 2 of | | | | Q9UKR8-2 | | |
| | | TSN16_HUMAN | | | | | | |
| | 125 | Isoform 3 of | | | | Q9UKR8-3 | | |
| | | TSN16_HUMAN | | | | | | |
| | 126 | Isoform 4 of | | | | Q9UKR8-4 | | |
| | | TSN16_HUMAN | | | | | | |
| 47 | 127 | UROK_HUMAN | 3 | 1.05 | 0.01289580 | P00749 | PLAU | Urokinase-type |
| | | | | | | | | plasminogen activator |
| | 128 | Isoform 2 of | | | | P00749-2 | | |
| | | UROK_HUMAN | | | | | | |
| 48 | 135 | ACTB_HUMAN | 2 | −0.66 | 0.01989421 | P60709 | ACTB | Actin, cytoplasmic 1 |
| 49 | 136 | CASP3_HUMAN | 2 | −0.77 | 0.01672936 | P42574 | CASP3 | Caspase-3 |
| 50 | 137 | DAF_HUMAN | 2 | 0.51 | 0.02261542 | P08174 | CD55 | Complement decay- |
| | | | | | | | | accelerating factor |
| | 138 | Isoform 1 of | | | | P08174-2 | | |
| | | DAF_HUMAN | | | | | | |
| | 139 | Isoform 3 of | | | | P08174-3 | | |
| | | DAF_HUMAN | | | | | | |
| | 140 | Isoform 4 of | | | | P08174-4 | | |
| | | DAF_HUMAN | | | | | | |
| | 141 | Isoform 5 of | | | | P08174-5 | | |
| | | DAF_HUMAN | | | | | | |
| | 142 | Isoform 6 of | | | | P08174-6 | | |
| | | DAF_HUMAN | | | | | | |
| | 143 | Isoform 7 of | | | | P08174-7 | | |
| | | DAF_HUMAN | | | | | | |
| 51 | 144 | HMGB2_HUMAN | 2 | 0.72 | 0.03511896 | P26583 | HMGB2 | High mobility group |
| | | | | | | | | protein B2 |
| 52 | 145 | HXC11_HUMAN | 2 | 0.91 | 0.03511896 | O43248 | HOXC11 | Homeobox protein |
| | | | | | | | | Hox-C11 |
| 53 | 146 | ICAM1_HUMAN | 2 | 0.71 | 0.02564186 | P05362 | ICAM1 | Intercellular adhesion |
| | | | | | | | | molecule 1 |
| 54 | 147 | IL12A_HUMAN | 2 | −0.71 | 0.03511896 | P29459 | IL12A | Interleukin-12 subunit |
| | | | | | | | | alpha |
| 55 | 194 | IL8_HUMAN | 2 | −0.83 | 0.03511896 | P10145 | CXCL8 | Interleukin-8 |
| 56 | 148 | KLF8_HUMAN | 2 | −0.67 | 0.01886910 | O95600 | KLF8 | Krueppel-like factor 8 |
| | 149 | Isoform 2 of | | | | O95600-3 | | |
| | | KLF8_HUMAN | | | | | | |
| | 150 | Isoform 3 of | | | | O95600-4 | | |
| | | KLF8_HUMAN | | | | | | |
| | 151 | Isoform 4 of | | | | O95600-5 | | |
| | | KLF8_HUMAN | | | | | | |
| | 152 | LEG4_HUMAN | 2 | −0.80 | 0.03511896 | P56470 | LGALS4 | Galectin-4 |
| 58 | 153 | LTOR1_HUMAN | 2 | 0.83 | 0.04600786 | Q6IAA8 | LAMTOR1 | Ragulator complex |
| | | | | | | | | protein LAMTOR1 |
| 59 | 154 | LYAM1_HUMAN | 2 | −0.62 | 0.03226915 | P14151 | SELL | L-selectin |
| | 155 | Isoform 2 of | | | | P14151-2 | | |
| | | LYAM1_HUMAN | | | | | | |
| 60 | 156 | MK03_HUMAN | 2 | −0.77 | 0.01886910 | P27361 | MAPK3 | Mitogen-activated |
| | | | | | | | | protein kinase 3 |
| | 157 | Isoform 2 of | | | | P27361-2 | | |
| | | MK03_HUMAN | | | | | | |
| | 158 | Isoform 3 of | | | | P27361-3 | | |
| | | MK03_HUMAN | | | | | | |
| 61 | 159 | MUC5B_HUMAN | 2 | −0.80 | 0.02047452 | Q9HC84 | MUC5B | Mucin-5B |
| 62 | 160 | NFAC4_HUMAN | 2 | −0.50 | 0.01281061 | Q14934 | NFATC4 | Nuclear factor of |
| | | | | | | | | activated T-cells, |
| | | | | | | | | cytoplasmic 4 |
| | 161 | Isoform 2 of | | | | Q14934-2 | | |
| | | NFAC4_HUMAN | | | | | | |
| | 162 | Isoform 3 of | | | | Q14934-3 | | |
| | | NFAC4_HUMAN | | | | | | |
| | 163 | Isoform 4 of | | | | Q14934-4 | | |
| | | NFAC4_HUMAN | | | | | | |
| | 164 | Isoform 5 of | | | | Q14934-5 | | |
| | | NFAC4_HUMAN | | | | | | |
| | 165 | Isoform 6 of | | | | Q14934-6 | | |
| | | NFAC4_HUMAN | | | | | | |
| | 166 | Isoform 7 of | | | | Q14934-7 | | |
| | | NFAC4_HUMAN | | | | | | |
| | 167 | Isoform 8 of | | | | Q14934-8 | | |
| | | NFAC4_HUMAN | | | | | | |
| | 168 | Isoform 9 of | | | | Q14934-9 | | |
| | | NFAC4_HUMAN | | | | | | |
| | 169 | Isoform 10 of | | | | Q14934-10 | | |
| | | NFAC4_HUMAN | | | | | | |
| | 170 | Isoform 11 of | | | | Q14934-11 | | |
| | | NFAC4_HUMAN | | | | | | |
| | 171 | Isoform 12 of | | | | Q14934-12 | | |
| | | NFAC4_HUMAN | | | | | | |
| | 172 | Isoform 13 of | | | | Q14934-13 | | |
| | | NFAC4_HUMAN | | | | | | |
| | 173 | Isoform 14 of | | | | Q14934-14 | | |
| | | NFAC4_HUMAN | | | | | | |
| | 174 | Isoform 15 of | | | | Q14934-15 | | |
| | | NFAC4_HUMAN | | | | | | |
| | 175 | Isoform 16 of | | | | Q14934-16 | | |
| | | NFAC4_HUMAN | | | | | | |
| | 176 | Isoform 17 of | | | | Q14934-17 | | |
| | | NFAC4_HUMAN | | | | | | |
| | 177 | Isoform 18 of | | | | Q14934-18 | | |
| | | NFAC4_HUMAN | | | | | | |
| | 178 | Isoform 19 of | | | | Q14934-19 | | |
| | | NFAC4_HUMAN | | | | | | |
| | 179 | Isoform 20 of | | | | Q14934-20 | | |
| | | NFAC4_HUMAN | | | | | | |
| | 180 | Isoform 21 of | | | | Q14934-21 | | |
| | | NFAC4_HUMAN | | | | | | |
| | 181 | Isoform 22 of | | | | Q14934-22 | | |
| | | NFAC4_HUMAN | | | | | | |
| | 182 | Isoform 23 of | | | | Q14934-23 | | |
| | | NFAC4_HUMAN | | | | | | |
| | 183 | Isoform 24 of | | | | Q14934-24 | | |
| | | NFAC4_HUMAN | | | | | | |
| 63 | 184 | TGFB1_HUMAN | 2 | 0.81 | 0.02912596 | P01137 | TGFB1 | Transforming growth |
| | | | | | | | | factor beta-1 |
| | | | | | | | | proprotein |
| 64 | 185 | VRK1_HUMAN | 2 | −0.87 | 0.04772231 | Q99986 | VRK1 | Serine/threonine- |
| | | | | | | | | protein kinase VRK1 |
| 65 | 195 | ARHG2_HUMAN | 1 | −0.41 | 0.03565782 | Q92974 | ARHGEF2 | Rho guanine nucleo- |
| | | | | | | | | tide exchange factor |
| | 196 | Isoform 2 of | | | | Q92974-2 | | |
| | | ARHG2_HUMAN | | | | | | |
| | 197 | Isoform 3 of | | | | Q92974-3 | | |
| | | ARHG2_HUMAN | | | | | | |
| 66 | 198 | CFLAR_HUMAN | 1 | 0.52 | 0.03006471 | O15519 | CFLAR | CASP8 and FADD-like |
| | | | | | | | | apoptosis regulator |
| | 199 | Isoform 2 of | | | | O15519-2 | | |
| | | CFLAR_HUMAN | | | | | | |
| | 200 | Isoform 3 of | | | | O15519-3 | | |
| | | CFLAR_HUMAN | | | | | | |
| | 201 | Isoform 4 of | | | | O15519-4 | | |
| | | CFLAR_HUMAN | | | | | | |
| | 202 | Isoform 5 of | | | | O15519-5 | | |
| | | CFLAR_HUMAN | | | | | | |
| | 203 | Isoform 6 of | | | | O15519-6 | | |
| | | CFLAR_HUMAN | | | | | | |
| | 204 | Isoform 7 of | | | | O15519-7 | | |
| | | CFLAR_HUMAN | | | | | | |
| | 205 | Isoform 8 of | | | | O15519-8 | | |
| | | CFLAR_HUMAN | | | | | | |
| | 206 | Isoform 9 of | | | | O15519-9 | | |
| | | CFLAR_HUMAN | | | | | | |
| | 207 | Isoform 10 of | | | | O15519-10 | | |
| | | CFLAR_HUMAN | | | | | | |
| | 208 | Isoform 11 of | | | | O15519-11 | | |
| | | CFLAR_HUMAN | | | | | | |
| | 209 | Isoform 12 of | | | | O15519-12 | | |
| | | CFLAR_HUMAN | | | | | | |
| | 210 | Isoform 13 of | | | | O15519-13 | | |
| | | CFLAR_HUMAN | | | | | | |
| | 211 | Isoform 14 of | | | | O15519-14 | | |
| | | CFLAR_HUMAN | | | | | | |
| | 212 | Isoform 15 of | | | | O15519-15 | | |
| | | CFLAR_HUMAN | | | | | | |
| 67 | 213 | CUED2_HUMAN | 1 | −0.70 | 0.01007946 | Q9H467 | CUEDC2 | CUE domain- |
| | | | | | | | | containing protein 2 |
| 68 | 214 | DAPK1_HUMAN | 1 | −0.65 | 0.02261542 | P53355 | DAPK1 | Death-associated |
| | | | | | | | | protein kinase 1 |
| | 215 | Isoform 2 of | | | | P53355-2 | | |
| | | DAPK1_HUMAN | | | | | | |
| | 216 | Isoform 3 of | | | | P53355-3 | | |
| | | DAPK1_HUMAN | | | | | | |
| | 217 | Isoform 4 of | | | | P53355-4 | | |
| | | DAPK1_HUMAN | | | | | | |
| 69 | 218 | EDNRA_HUMAN | 1 | 0.58 | 0.02900873 | P25101 | EDNRA | Endothelin-1 receptor |
| | 219 | Isoform 2 of | | | | P25101-2 | | |
| | | EDNRA_HUMAN | | | | | | |
| | 220 | Isoform 3 of | | | | P25101-3 | | |
| | | EDNRA_HUMAN | | | | | | |
| | 221 | Isoform 4 of | | | | P25101-4 | | |
| | | EDNRA_HUMAN | | | | | | |
| | | Isoform 5 of | | | | P25101-5 | | |
| | | EDNRA_HUMAN | | | | | | |
| 70 | 223 | EIF3B_HUMAN | 1 | 0.69 | 0.01829644 | P55884 | EIF3B | Eukaryotic translation |
| | | | | | | | | initiation factor 3 sub- |
| | | | | | | | | unit |
| | 224 | Isoform 2 of | | | | P55884-2 | | |
| | | EIF3B_HUMAN | | | | | | |
| 71 | 225 | ID2_HUMAN | 1 | 0.32 | 0.03707986 | Q02363 | ID2 | DNA-binding protein |
| | | | | | | | | inhibitor ID-2 |
| 72 | 226 | LMNA_HUMAN | 1 | −0.63 | 0.03353007 | P02545 | LMNA | Prelamin-A/C |
| | 227 | Isoform C of | | | | P02545-2 | | |
| | | LMNA_HUMAN | | | | | | |
| | 228 | Isoform | | | | P02545-3 | | |
| | | ADelta10 of | | | | | | |
| | | LMNA_HUMAN | | | | | | |
| | 229 | Isoform 4 of | | | | P02545-4 | | |
| | | LMNA_HUMAN | | | | | | |
| | 230 | Isoform 5 of | | | | P02545-5 | | |
| | | LMNA_HUMAN | | | | | | |
| | 231 | Isoform 6 of | | | | P02545-6 | | |
| | | LMNA_HUMAN | | | | | | |
| 73 | 232 | PYR1_HUMAN | 1 | −0.65 | 0.01284425 | P27708 | CAD | CAD protein |
| 74 | 233 | ZN593_HUMAN | 1 | 0.62 | 0.01284425 | O00488 | ZNF593 | Zinc finger protein 593 |
| 75 | 237 | ANGT_HUMAN | 0 | −0.42 | 0.04109223 | P01019 | AGT | Angiotensinogen |
| 76 | 238 | APC_HUMAN | 0 | −0.42 | 0.02825626 | P25054 | APC | Adenomatous |
| | | | | | | | | polyposis coli protein |
| | 239 | Isoform 2 of | | | | P25054-2 | | |
| | | APC_HUMAN | | | | | | |
| | 240 | Isoform 1B of | | | | P25054-3 | | |
| | | APC_HUMAN | | | | | | |
| 77 | 241 | PO2F1_HUMAN | 0 | 0.31 | 0.02825626 | P14859 | POU2F1 | POU domain, class 2, |
| | | | | | | | | transcription factor 1 |
| | 242 | Isoform 2 of | | | | P14859-2 | | |
| | | PO2F1_HUMAN | | | | | | |
| | 243 | Isoform 3 of | | | | P14859-3 | | |
| | | PO2F1_HUMAN | | | | | | |
| | 244 | Isoform 6 of | | | | P14859-6 | | |
| | | PO2F1_HUMAN | | | | | | |
| | 245 | Isoform 4 of | | | | P14859-4 | | |
| | | PO2F1_HUMAN | | | | | | |
| | 246 | Isoform 5 of | | | | P14859-5 | | |
| | | PO2F1_HUMAN | | | | | | |
| 78 | 247 | SSR4_HUMAN | 0 | −0.40 | 0.02825626 | P31391 | SSTR4 | Somatostatin receptor |
| | | | | | | | | type 4 |
| 79 | 248 | TNAP3_HUMAN | 0 | −0.49 | 0.03707986 | P21580 | TNFAIP3 | Tumor necrosis factor |
| | | | | | | | | alpha-induced protein 3 |

[0426] Table 3 shows 26 diagnostic biomarkers of the present invention.

TABLE 3

| | SEQ ID | Uniprot entry | Qual | | | Uniprot | | |
|---|---|---|---|---|---|---|---|---|
| No. | No. | name | score | logFC | adj. p-Val | accession | Gene name | Protein name |
| 1 | 1 | PGH2_HUMAN | 7 | −3.49 | 0.00000080 | P35354 | PTGS2 | Prostaglandin G/H |
| | | | | | | | | synthase 2 |
| 2 | 13 | IFNA1_HUMAN | 6 | 1.09 | 0.00041027 | P01562 | IFNA1; | Interferon alpha- |
| | | | | | | | IFNA13 | 1/13 |
| 3 | 80 | CASP9_HUMAN | 4 | 1.26 | 0.01917485 | P55211 | CASP9 | Caspase-9 |
| | 81 | Isoform 2 of | | | | P55211-2 | | |
| | | CASP9_HUMAN | | | | | | |
| | 82 | Isoform 3 of | | | | P55211-3 | | |
| | | CASP9_HUMAN | | | | | | |
| | 83 | Isoform 4 of | | | | P55211-4 | | |
| | | CASP9_HUMAN | | | | | | |
| 4 | 25 | IL18_HUMAN | 4 | 1.00 | 0.01705270 | Q14116 | IL18 | Interleukin-18 |
| | 26 | Isoform 2 of | | | | Q14116-2 | | |
| | | IL18_HUMAN | | | | | | |
| 5 | 27 | IL7_HUMAN | 4 | 1.02 | 0.01917485 | P13232 | IL7 | Interleukin-7 |
| | 28 | Isoform 2 of | | | | P13232-2 | | |
| | | IL7_HUMAN | | | | | | |
| | 29 | Isoform 3 of | | | | P13232-3 | | |
| | | IL7_HUMAN | | | | | | |
| 6 | 129 | PYRG1_HUMAN | 3 | 1.03 | 0.04367345 | P17812 | CTPS1 | CTP synthase 1 |
| | 130 | Isoform 2 of | | | | P17812-2 | | |
| | | PYRG1_HUMAN | | | | | | |
| 7 | 18 | CCL7_HUMAN | 3 | 0.74 | 0.04367345 | P80098 | CCL7 | C—C motif |
| | | | | | | | | chemokine 7 |
| 8 | no ID | CD139 (no entry, | 3 | −1.22 | 0.03468974 | no entry | | |
| | | no protein) | | | | | | |
| 9 | 61 | CCL11_HUMAN | 3 | 1.15 | 0.01633199 | P51671 | CCL11 | Eotaxin |
| 10 | 65 | CRLF2_HUMAN | 3 | 1.01 | 0.01848700 | Q9HC73 | CRLF2 | Cytokine receptor- |
| | | | | | | | | like factor 2 |
| | 66 | Isoform 2 of | | | | Q9HC73-2 | | |
| | | CRLF2_HUMAN | | | | | | |
| | 67 | Isoform 3 of | | | | Q9HC73-3 | | |
| | | CRLF2_HUMAN | | | | | | |
| 11 | 131 | MAD4_HUMAN | 3 | 1.09 | 0.01633199 | Q14582 | MXD4 | Max dimerization |
| | | | | | | | | protein 4 |
| 12 | 98 | IL15_HUMAN | 3 | 1.08 | 0.01242697 | P40933 | IL15 | Interleukin-15 |
| | 99 | Isoform IL15- | | | | P40933-2 | | |
| | | S21AA of | | | | | | |
| | | IL15_HUMAN | | | | | | |
| 13 | 121 | RBM3_HUMAN | 3 | 0.96 | 0.01754186 | P98179 | RBM3 | RNA-binding |
| | | | | | | | | protein 3 |
| 14 | 132 | TMM54_HUMAN | 3 | 0.80 | 0.01242697 | Q969K7 | TMEM54 | Transmembrane |
| | | | | | | | | protein 54 |
| | 133 | Isoform 2 of | | | | Q969K7-2 | | |
| | | TMM54_HUMAN | | | | | | |
| | 134 | Isoform 3 of | | | | Q969K7-3 | | |
| | | TMM54_HUMAN | | | | | | |
| 15 | 148 | KLF8_HUMAN | 2 | −0.93 | 0.04479542 | O95600 | KLF8 | Krueppel-like factor |
| | | | | | | | | 8 |
| | 149 | Isoform 2 of | | | | O95600-3 | | |
| | | KLF8_HUMAN | | | | | | |
| | 150 | Isoform 3 of | | | | O95600-4 | | |
| | | KLF8__HUMAN | | | | | | |
| | 151 | Isoform 4 of | | | | O95600-5 | | |
| | | KLF8_HUMAN | | | | | | |
| 16 | 112 | MMP1_HUMAN | 2 | 0.71 | 0.01633199 | P03956 | MMP1 | Interstitial |
| | | | | | | | | collagenase |
| 17 | 186 | CDKN3_HUMAN | 2 | −0.71 | 0.01978279 | Q16667 | CDKN3 | Cyclin-dependent |
| | | | | | | | | kinase inhibitor 3 |
| | 187 | Isoform 2 of | | | | Q16667-2 | | |
| | | CDKN3_HUMAN | | | | | | |
| 18 | 188 | TFPI2_HUMAN | 2 | −0.79 | 0.03075045 | P48307 | TFPI2 | Tissue factor |
| | | | | | | | | pathway inhibitor 2 |
| | 189 | Isoform 2 of | | | | P48307-2 | | |
| | | TFP12_HUMAN | | | | | | |
| 19 | 93 | GAS6_HUMAN | 2 | 0.79 | 0.01633199 | Q14393 | GAS6 | Growth arrest- |
| | | | | | | | | specific protein 6 |
| | 94 | Isoform 2 of | | | | Q14393-1 | | |
| | | GAS6_HUMAN | | | | | | |
| | 95 | Isoform 3 of | | | | Q14393-3 | | |
| | | GAS6_HUMAN | | | | | | |
| | 96 | Isoform 4 of | | | | Q14393-4 | | |
| | | GAS6_HUMAN | | | | | | |
| | 97 | Isoform 5 of | | | | Q14393-5 | | |
| | | GAS6_HUMAN | | | | | | |
| 20 | 190 | MLP3B_HUMAN | 2 | 0.99 | 0.01633199 | Q9GZQ8 | MAP1LC3B | Microtubule-associ- |
| | | | | | | | | ated proteins 1A/1B |
| | | | | | | | | light chain 3B |
| 21 | 52 | CASP8_HUMAN | 2 | 0.89 | 0.04367345 | Q14790 | CASP8 | Caspase-8 |
| | 53 | Isoform 2 of | | | | Q14790-2 | | |
| | | CASP8_HUMAN | | | | | | |
| | 54 | Isoform 3 of | | | | Q14790-3 | | |
| | | CASP8_HUMAN | | | | | | |
| | 55 | Isoform 4 of | | | | Q14790-4 | | |
| | | CASP8_HUMAN | | | | | | |
| | 56 | Isoform 5 of | | | | Q14790-5 | | |
| | | CASP8_HUMAN | | | | | | |
| | 57 | Isoform 6 of | | | | Q14790-6 | | |
| | | CASP8_HUMAN | | | | | | |
| | 58 | Isoform 7 of | | | | Q14790-7 | | |
| | | CASP8_HUMAN | | | | | | |
| | 59 | Isoform 8 of | | | | Q14790-8 | | |
| | | CASP8_HUMAN | | | | | | |
| | 60 | Isoform 9 of | | | | Q14790-9 | | |
| | | CASP8_HUMAN | | | | | | |
| 22 | 191 | PTEN_HUMAN | 2 | 0.93 | 0.01633199 | P60484 | PTEN | Phosphatidylinositol |
| | | | | | | | | 3,4,5-trisphosphate |
| | | | | | | | | 3-phosphatase and |
| | | | | | | | | dual-specificity pro- |
| | | | | | | | | tein phosphatase |
| | | | | | | | | PTEN |
| | 192 | Isoform alpha of | | | | P60484-2 | | |
| | | PTEN_HUMAN | | | | | | |
| | 193 | Isoform 3 of | | | | P60484-3 | | |
| | | PTEN_HUMAN | | | | | | |
| 23 | 234 | MK12_HUMAN | 1 | 0.69 | 0.04367345 | P53778 | MAPK12 | Mitogen-activated |
| | | | | | | | | protein kinase 12 |
| | 235 | Isoform 2 of | | | | P53778-2 | | |
| | | MK12_HUMAN | | | | | | |
| 24 | 236 | CP1B1_HUMAN | 1 | −0.56 | 0.01978279 | Q16678 | CYP1B1 | Cytochrome P450 |
| | | | | | | | | 1B1 |
| 25 | 249 | TRI22_HUMAN | 0 | 0.44 | 0.04624814 | Q8IYM9 | TRIM22 | E3 ubiquitin-protein |
| | | | | | | | | ligase TRIM22 |
| | 250 | Isoform 2 of | | | | Q8IYM9-2 | | |
| | | TRI22_HUMAN | | | | | | |

[0427] 12 biomarkers have been found to be both predictive and diagnostic biomarkers. 12 biomarkers being both predictive and diagnostic are shown in Table 4.

TABLE 4

| | SEQ ID | Uniprot entry | Pre/ | Qual | | | Uniprot | Gene | |
|---|---|---|---|---|---|---|---|---|---|
| No. | No. | name | diag | score | logFC | adj. p-Val | accession | name | Protein name |
| 1 | 52 | CASP8_HUMAN | pre | 4 | −0.98 | 0.00743181 | Q14790 | CASP8 | Caspase-8 |
| | | | diag | 2 | 0.89 | 0.04367345 | Q14790 | | |
| | 53 | Isoform 2 of | | | | | Q14790-2 | | |
| | | CASP8_HUMAN | | | | | | | |
| | 54 | Isoform 3 of | | | | | Q14790-3 | | |
| | | CASP8_HUMAN | | | | | | | |
| | 55 | Isoform 4 of | | | | | Q14790-4 | | |
| | | CASP8_HUMAN | | | | | | | |
| | 56 | Isoform 5 of | | | | | Q14790-5 | | |
| | | CASP8_HUMAN | | | | | | | |
| | 57 | Isoform 6 of | | | | | Q14790-6 | | |
| | | CASP8_HUMAN | | | | | | | |
| | 58 | Isoform 7 of | | | | | Q14790-7 | | |
| | | CASP8_HUMAN | | | | | | | |
| | 59 | Isoform 8 of | | | | | Q14790-8 | | |
| | | CASP8_HUMAN | | | | | | | |
| | 60 | Isoform 9 of | | | | | Q14790-9 | | |
| | | CASP8_HUMAN | | | | | | | |
| 2 | 61 | CCL11_HUMAN | pre | 4 | −0.92 | 0.00743181 | P51671 | CCL11 | Eotaxin |
| | | | diag | 3 | 1.15 | 0.01633199 | P51671 | | |
| 3 | 18 | CCL7_HUMAN | pre | 5 | −0.82 | 0.00082227 | P80098 | CCL7 | C—C motif |
| | | | | | | | | | chemokine 7 |
| | | | diag | 3 | 0.74 | 0.04367345 | P80098 | | |
| 4 | 65 | CRLF2_HUMAN | pre | 4 | −1.08 | 0.00866136 | Q9HC73 | CRLF2 | Cytokine |
| | | | | | | | | | receptor-like |
| | | | | | | | | | factor 2 |
| | | | diag | 3 | 1.01 | 0.01848700 | Q9HC73 | | |
| | 66 | Isoform 2 of | | | | | Q9HC73-2 | | |
| | | CRLF2_HUMAN | | | | | | | |
| | 67 | Isoform 3 of | | | | | Q9HC73-3 | | |
| | | CRLF2_HUMAN | | | | | | | |
| 5 | 93 | GAS6_HUMAN | pre | 3 | −0.83 | 0.01370348 | Q14393 | GAS6 | Growth arrest- |
| | | | | | | | | | specific protein 6 |
| | | | diag | 2 | 0.79 | 0.01633199 | Q14393 | | |
| | 94 | Isoform 2 of | | | | | Q14393-1 | | |
| | | GAS6_HUMAN | | | | | | | |
| | 95 | Isoform 3 of | | | | | Q14393-3 | | |
| | | GAS6_HUMAN | | | | | | | |
| | 96 | Isoform 4 of | | | | | Q14393-4 | | |
| | | GAS6_HUMAN | | | | | | | |
| | 97 | Isoform 5 of | | | | | Q14393-5 | | |
| | | GAS6_HUMAN | | | | | | | |
| 6 | 13 | IFNA1_HUMAN | pre | 3 | −0.99 | 0.03511896 | P01562 | IFNA1; | Interferon alpha- |
| | | | | | | | | IFNA13 | 1/13 |
| | | | diag | 6 | 1.09 | 0.00041027 | P01562 | | |
| 7 | 98 | IL15_HUMAN | pre | 3 | −0.94 | 0.01585528 | P40933 | IL15 | Interleukin-15 |
| | | | diag | 3 | 1.08 | 0.01242697 | P40933 | | |
| | 99 | Isoform IL15- | | | | | P40933-2 | | |
| | | S21AA of | | | | | | | |
| | | IL15_HUMAN | | | | | | | |
| 8 | 25 | IL18_HUMAN | pre | 5 | −1.03 | 0.00709074 | Q14116 | IL18 | Interleukin-18 |
| | | | diag | 4 | 1.00 | 0.01705270 | Q14116 | | |
| | 26 | Isoform 2 of | | | | | Q14116-2 | | |
| | | IL18_HUMAN | | | | | | | |
| 9 | 27 | IL7_HUMAN | pre | 5 | −0.98 | 0.00077460 | P13232 | IL7 | |
| | | | diag | 4 | 1.02 | 0.01917485 | P13232 | | Interleukin-7 |
| | 28 | Isoform 2 of | | | | | P13232-2 | | |
| | | IL7_HUMAN | | | | | | | |
| | 29 | Isoform 3 of | | | | | P13232-3 | | |
| | | IL7_HUMAN | | | | | | | |
| 10 | 148 | KLF8_HUMAN | pre | 2 | −0.67 | 0.01886910 | O95600 | KLF8 | Krueppel-like |
| | | | | | | | | | factor 8 |
| | | | diag | 2 | −0.93 | 0.04479542 | O95600 | | |
| | 149 | Isoform 2 of | | | | | O95600-3 | | |
| | | KLF8_HUMAN | | | | | | | |
| | 150 | Isoform 3 of | | | | | O95600-4 | | |
| | | KLF8_HUMAN | | | | | | | |
| | 151 | Isoform 4 of | | | | | O95600-5 | | |
| | | KLF8_HUMAN | | | | | | | |
| 11 | 112 | MMP1_HUMAN | pre | 3 | −0.59 | 0.00208582 | P03956 | MMP1 | Interstitial |
| | | | | | | | | | collagenase |
| | | | diag | 2 | 0.71 | 0.01633199 | P03956 | | |
| 12 | 121 | RBM3_HUMAN | pre | 3 | −0.88 | 0.00173864 | P98179 | RBM3 | RNA-binding |
| | | | | | | | | | protein 3 |
| | | | diag | 3 | 0.96 | 0.01754186 | P98179 | | |

[0428] 35 biomarkers showing higher abundance in AKI patients are shown in Table 5.

TABLE 5

| | SEQ | Uniprot entry | Pre/ | Qual | | | Uniprot | | |
|---|---|---|---|---|---|---|---|---|---|
| No. | ID No. | name | diag | score | logFC | adj. p-Val | accession | Gene name | Protein name |
| 1 | 13 | IFNA1_HUMAN | diag | 6 | 1.09 | 0.00041027 | P01562 | IFNA1; | Interferon |
| | | | | | | | | IFNA13 | alpha-1/13 |
| 2 | 69-77 | P53_HUMAN | pre | 4 | 0.81 | 0.00173864 | P04637 | TP53 | Cellular tumor |
| | | | | | | | | | antigen p53 |
| 3 | 80-83 | CASP9_HUMAN | diag | 4 | 1.26 | 0.01917485 | P55211 | CASP9 | Caspase-9 |
| 4 | 27-29 | IL7_HUMAN | diag | 4 | 1.02 | 0.01917485 | P13232 | IL7 | Interleukin-7 |
| 5 | 25-26 | IL18__HUMAN | diag | 4 | 1.00 | 0.01705270 | Q14116 | IL18 | Interleukin-18 |
| 6 | 122 | SAMP_HUMAN | pre | 3 | 1.60 | 0.04927846 | P02743 | APCS | Serum amyloid |
| | | | | | | | | | P-component |
| 7 | 127-128 | UROK_HUMAN | pre | 3 | 1.05 | 0.01289580 | P00749 | PLAU | Urokinase-type |
| | | | | | | | | | plasminogen |
| | | | | | | | | | activator |
| 8 | 102-103 | K2C8_HUMAN | pre | 3 | 0.97 | 0.03749303 | P05787 | KRT8 | Keratin, type II |
| | | | | | | | | | cytoskeletal 8 |
| 9 | 61 | CCL11_HUMAN | diag | 3 | 1.15 | 0.01633199 | P51671 | CCL11 | Eotaxin |
| 10 | 131 | MAD4_HUMAN | diag | 3 | 1.09 | 0.01633199 | Q14582 | MXD4 | Max |
| | | | | | | | | | dimerization |
| | | | | | | | | | protein 4 |
| 11 | 98-99 | IL15_HUMAN | diag | 3 | 1.08 | 0.01242697 | P40933 | IL15 | Interleukin-15 |
| 12 | 129-130 | PYRG1_HUMAN | diag | 3 | 1.03 | 0.04367345 | P17812 | CTPS1 | CTP synthase 1 |
| 13 | 65-67 | CRLF2_HUMAN | diag | 3 | 1.01 | 0.01848700 | Q9HC73 | CRLF2 | Cytokine |
| | | | | | | | | | receptor-like |
| | | | | | | | | | factor 2 |
| 14 | 121 | RBM3_HUMAN | diag | 3 | 0.96 | 0.01754186 | P98179 | RBM3 | RNA-binding |
| | | | | | | | | | protein 3 |
| 15 | 132-134 | TMM54_HUMAN | diag | 3 | 0.80 | 0.01242697 | Q969K7 | TMEM54 | Transmembrane |
| | | | | | | | | | protein 54 |
| 16 | 18 | CCL7_HUMAN | diag | 3 | 0.74 | 0.04367345 | P80098 | CCL7 | C—C motif |
| | | | | | | | | | chemokine 7 |
| 17 | 145 | HXC11_HUMAN | pre | 2 | 0.91 | 0.03511896 | O43248 | HOXC11 | Homeobox |
| | | | | | | | | | protein Hox-C11 |
| 18 | 153 | LTOR1_HUMAN | pre | 2 | 0.83 | 0.04600786 | Q6IAA8 | LAMTOR1 | Ragulator |
| | | | | | | | | | complex protein |
| | | | | | | | | | LAMTOR1 |
| 19 | 184 | TGFB1_HUMAN | pre | 2 | 0.81 | 0.02912596 | P01137 | TGFB1 | Transforming |
| | | | | | | | | | growth factor |
| | | | | | | | | | beta-1 propro- |
| | | | | | | | | | tein |
| 20 | 144 | HMGB2_HUMAN | pre | 2 | 0.72 | 0.03511896 | P26583 | HMGB2 | High mobility |
| | | | | | | | | | group protein B2 |
| 21 | 146 | ICAM1_HUMAN | pre | 2 | 0.71 | 0.02564186 | P05362 | ICAM1 | Intercellular |
| | | | | | | | | | adhesion |
| | | | | | | | | | molecule 1 |
| 22 | 137-143 | DAF_HUMAN | pre | 2 | 0.51 | 0.02261542 | P08174 | CD55 | Complement |
| | | | | | | | | | decay- |
| | | | | | | | | | accelerating |
| | | | | | | | | | factor |
| 23 | 190 | MLP3B_HUMAN | diag | 2 | 0.99 | 0.01633199 | Q9GZQ8 | MAP1LC3B | Microtubule- |
| | | | | | | | | | associated pro- |
| | | | | | | | | | teins 1A/1B light |
| | | | | | | | | | chain 3B |
| 24 | 191-193 | PTEN_HUMAN | diag | 2 | 0.93 | 0.01633199 | P60484 | PTEN | Phosphatidylino- |
| | | | | | | | | | sitol 3,4,5- |
| | | | | | | | | | trisphosphate 3- |
| | | | | | | | | | phosphatase |
| | | | | | | | | | and dual-speci- |
| | | | | | | | | | ficity protein |
| | | | | | | | | | phosphatase |
| | | | | | | | | | PTEN |
| 25 | 52-60 | CASP8_HUMAN | diag | 2 | 0.89 | 0.04367345 | Q14790 | CASP8 | Caspase-8 |
| 26 | 93-97 | GAS6_HUMAN | diag | 2 | 0.79 | 0.01633199 | Q14393 | GAS6 | Growth arrest- |
| | | | | | | | | | specific protein |
| | | | | | | | | | 6 |
| 27 | 112 | MMP1_HUMAN | diag | 2 | 0.71 | 0.01633199 | P03956 | MMP1 | Interstitial |
| | | | | | | | | | collagenase |
| 28 | 223-224 | EIF3B_HUMAN | pre | 1 | 0.69 | 0.01829644 | P55884 | EIF3B | Eukaryotic trans- |
| | | | | | | | | | lation initiation |
| | | | | | | | | | factor 3 subunit |
| | | | | | | | | | B |
| 29 | 233 | ZN593_HUMAN | pre | 1 | 0.62 | 0.01284425 | O00488 | ZNF593 | Zinc finger |
| | | | | | | | | | protein 593 |
| 30 | 218-222 | EDNRA_HUMAN | pre | 1 | 0.58 | 0.02900873 | P25101 | EDNRA | Endothelin-1 |
| | | | | | | | | | receptor |
| 31 | 198-212 | CFLAR_HUMAN | pre | 1 | 0.52 | 0.03006471 | O15519 | CFLAR | CASP8 and |
| | | | | | | | | | FADD-like apop- |
| | | | | | | | | | tosis regulator |
| 32 | 225 | ID2_HUMAN | pre | 1 | 0.32 | 0.03707986 | Q02363 | ID2 | DNA-binding |
| | | | | | | | | | protein inhibitor |
| | | | | | | | | | ID-2 |
| 33 | 234-235 | MK12_HUMAN | diag | 1 | 0.69 | 0.04367345 | P53778 | MAPK12 | Mitogen- |
| | | | | | | | | | activated |
| | | | | | | | | | protein kinase |
| | | | | | | | | | 12 |
| 34 | 241-246 | PO2F1_HUMAN | pre | 0 | 0.31 | 0.02825626 | P14859 | POU2F1 | POU domain, |
| | | | | | | | | | class 2, tran- |
| | | | | | | | | | scription factor 1 |
| 35 | 249-250 | TRI22_HUMAN | diag | 0 | 0.44 | 0.04624814 | Q8IYM9 | TRIM22 | E3 ubiquitin- |
| | | | | | | | | | protein ligase |
| | | | | | | | | | TRIM22 |

[0429] 68 biomarkers showing lower abundance in AKI patients are shown in Table 6.

TABLE 6

| | SEQ | Uniprot entry | Pre/ | Qual | | | Uniprot | Gene | |
|---|---|---|---|---|---|---|---|---|---|
| No. | ID No. | name | diag | score | logFC | adj. p-Val | accession | name | Protein name |
| 1 | 1 | PGH2_HUMAN | diag | 7 | −3.49 | 0.00000080 | P35354 | PTGS2 | Prostaglandin G/H |
| | | | | | | | | | synthase 2 |
| 2 | no ID | CD15 (no entry, | pre | 6 | −0.86 | 0.00000004 | no entry | CD15 | CD15 |
| | | no protein) | | | | | | | |
| 3 | 2-4 | CD99_HUMAN | pre | 6 | −0.98 | 0.00000440 | P14209 | CD99 | CD99 antigen |
| 4 | 6-12 | TNR6_HUMAN | pre | 6 | −1.32 | 0.00003060 | P25445 | FAS | Tumor necrosis |
| | | | | | | | | | factor receptor |
| | | | | | | | | | superfamily |
| | | | | | | | | | member 6 |
| 5 | 251- | No entry (Lig- | pre | 6 | −1.60 | 0.00000083 | | | Ligands of TNR1B |
| | 252 | ands of | | | | | | | including TNF- |
| | | TNR1B_HUMAN | | | | | | | alpha and lympho- |
| | | including | | | | | | | toxin-alpha |
| | | TNFA_HUMAN | | | | | | | |
| | | and TNFB HU- | | | | | | | |
| | | MAN) | | | | | | | |
| 6 | 5 | FCERA_HUMAN | pre | 6 | −1.63 | 0.00049891 | P12319 | FCER1A | High affinity |
| | | | | | | | | | immunoglobulin |
| | | | | | | | | | epsilon receptor |
| | | | | | | | | | subunit alpha |
| 7 | 19 | CD9_HUMAN | pre | 5 | −0.78 | 0.00077460 | P21926 | CD9 | CD9 antigen |
| 8 | 20 | DKK2_HUMAN | pre | 5 | −0.78 | 0.00077460 | Q9UBU2 | DKK2 | Dickkopf-related |
| | | | | | | | | | protein 2 |
| 9 | 18 | CCL7_HUMAN | pre | 5 | −0.82 | 0.00082227 | P80098 | CCL7 | C—C motif |
| | | | | | | | | | chemokine 7 |
| 10 | 43-46 | TOP2A_HUMAN | pre | 5 | −0.88 | 0.00077460 | P11388 | TOP2A | DNA |
| | | | | | | | | | topoisomerase 2- |
| | | | | | | | | | alpha |
| 11 | 31-38 | PTPRC_HUMAN | pre | 5 | −0.93 | 0.00021371 | P08575 | PTPRC | Receptor-type |
| | | | | | | | | | tyrosine-protein |
| | | | | | | | | | phosphatase C |
| 12 | 30 | PRIO_HUMAN | pre | 5 | −0.95 | 0.00077460 | P04156 | PRNP | Major prion |
| | | | | | | | | | protein |
| 13 | 39-40 | SELPL_HUMAN | pre | 5 | −0.96 | 0.00020190 | Q14242 | SELPLG | P-selectin |
| | | | | | | | | | glycoprotein |
| | | | | | | | | | ligand 1 |
| 14 | 27-29 | IL7_HUMAN | pre | 5 | −0.98 | 0.00077460 | P13232 | IL7 | Interleukin-7 |
| 15 | 14-17 | BASI_HUMAN | pre | 5 | −1.00 | 0.00456896 | P35613 | BSG | Basigin |
| 16 | 21-24 | HMMR_HUMAN | pre | 5 | −1.02 | 0.00743181 | O75330 | HMMR | Hyaluronan |
| | | | | | | | | | mediated motility |
| | | | | | | | | | receptor |
| 17 | 25-26 | IL18_HUMAN | pre | 5 | −1.03 | 0.00709074 | Q14116 | IL18 | Interleukin-18 |
| 18 | 41-42 | TNF14_HUMAN | pre | 5 | −1.23 | 0.00896522 | O43557 | TNFSF14 | Tumor necrosis |
| | | | | | | | | | factor ligand |
| | | | | | | | | | superfamily |
| | | | | | | | | | member 14 |
| 19 | 78-79 | PAK1_HUMAN | pre | 4 | −0.74 | 0.00901111 | Q13153 | PAK1 | Serine/threonine- |
| | | | | | | | | | protein kinase |
| | | | | | | | | | PAK 1 |
| 20 | 68 | LMNB1_HUMAN | pre | 4 | −0.78 | 0.00041269 | P20700 | LMNB1 | Lamin-B1 |
| 21 | 64 | CD14_HUMAN | pre | 4 | −0.87 | 0.00975827 | P08571 | CD14 | Monocyte |
| | | | | | | | | | differentiation |
| | | | | | | | | | antigen CD14 |
| 22 | 61 | CCL11_HUMAN | pre | 4 | −0.92 | 0.00743181 | P51671 | CCL11 | Eotaxin |
| 23 | 52-60 | CASP8_HUMAN | pre | 4 | −0.98 | 0.00743181 | Q14790 | CASP8 | Caspase-8 |
| 24 | 62 | CCL3_HUMAN | pre | 4 | −1.00 | 0.03040191 | P10147 | CCL3 | C—C motif |
| | | | | | | | | | chemokine 3 |
| 25 | 47-51 | BDNF_HUMAN | pre | 4 | −1.03 | 0.03226915 | P23560 | BDNF | Brain-derived |
| | | | | | | | | | neurotrophic |
| | | | | | | | | | factor |
| 26 | 63 | CCL5_HUMAN | pre | 4 | −1.07 | 0.00896522 | P13501 | CCL5 | C—C motif |
| | | | | | | | | | chemokine 5 |
| 27 | 65-67 | CRLF2_HUMAN | pre | 4 | −1.08 | 0.00866136 | Q9HC73 | CRLF2 | Cytokine |
| | | | | | | | | | receptor-like |
| | | | | | | | | | factor 2 |
| 28 | 85-88 | CD47_HUMAN | pre | 3 | −0.54 | 0.00118575 | Q08722 | CD47 | Leukocyte surface |
| | | | | | | | | | antigen CD47 |
| 29 | 104 | LEUK_HUMAN | pre | 3 | −0.59 | 0.00095308 | P16150 | SPN | Leukosialin |
| 30 | 112 | MMP1_HUMAN | pre | 3 | −0.59 | 0.00208582 | P03956 | MMP1 | Interstitial |
| | | | | | | | | | collagenase |
| 31 | 107- | MELPH_HUMAN | pre | 3 | −0.76 | 0.03511896 | Q9BV36 | MLPH | Melanophilin |
| | 111 | | | | | | | | |
| 32 | 120 | PRTN3_HUMAN | pre | 3 | −0.76 | 0.02563658 | P24158 | PRTN3 | Myeloblastin |
| 33 | 92 | DKK3_HUMAN | pre | 3 | −0.77 | 0.03511896 | Q9UBP4 | DKK3 | Dickkopf-related |
| | | | | | | | | | protein 3 |
| 34 | 105- | MARK4_HUMAN | pre | 3 | −0.79 | 0.00167421 | Q96L34 | MARK4 | MAP/microtubule |
| | 106 | | | | | | | | affinity-regulating |
| | | | | | | | | | kinase 4 |
| 35 | 84 | BGH3_HUMAN | pre | 3 | −0.79 | 0.00768649 | Q15582 | TGFBI | Transforming |
| | | | | | | | | BIGH3 | growth factor- |
| | | | | | | | | | beta-induced |
| | | | | | | | | | protein ig-h3 |
| 36 | 100- | IL3RB_HUMAN | pre | 3 | −0.80 | 0.01834127 | P32927 | CSF2RB | Cytokine receptor |
| | 101 | | | | | | | | common subunit |
| | | | | | | | | | beta |
| 37 | 114- | PGH1_HUMAN | pre | 3 | −0.81 | 0.00801786 | P23219 | PTGS1 | Prostaglandin G/H |
| | 119 | | | | | | | | synthase 1 |
| 38 | 93-97 | GAS6_HUMAN | pre | 3 | −0.83 | 0.01370348 | Q14393 | GAS6 | Growth arrest- |
| | | | | | | | | | specific protein 6 |
| 39 | 121 | RBM3_HUMAN | pre | 3 | −0.88 | 0.00173864 | P98179 | RBM3 | RNA-binding |
| | | | | | | | | | protein 3 |
| 40 | 89-91 | CD8A_HUMAN | pre | 3 | −0.93 | 0.02217931 | P01732 | CD8A | T-cell surface |
| | | | | | | | | | glycoprotein CD8 |
| | | | | | | | | | alpha chain |
| 41 | 98 | IL15_HUMAN | pre | 3 | −0.94 | 0.01585528 | P40933 | IL15 | Interleukin-15 |
| 42 | 123- | TSN16_HUMAN | pre | 3 | −0.95 | 0.01860133 | Q9UKR8 | TSPAN16 | Tetraspanin-16 |
| | 126 | | | | | | | | |
| 43 | 113 | MMP7_HUMAN | pre | 3 | −0.96 | 0.03511896 | P09237 | MMP7 | Matrilysin |
| 44 | 13 | IFNA1_HUMAN | pre | 3 | −0.99 | 0.03511896 | P01562 | IFNA1; | Interferon alpha- |
| | | | | | | | | IFNA13 | 1/13 |
| 45 | no ID | CD139 (no entry, | diag | 3 | −1.22 | 0.03468974 | no entry | CD139 | CD139 |
| | | no protein) | | | | | | | |
| 46 | 160- | NFAC4_HUMAN | pre | 2 | −0.50 | 0.01281061 | Q14934 | NFATC4 | Nuclear factor of |
| | 183 | | | | | | | | activated T-cells |
| 47 | 154- | LYAM1_HUMAN | pre | 2 | −0.62 | 0.03226915 | P14151 | SELL | L-selectin |
| | 155 | | | | | | | | |
| 48 | 135 | ACTB_HUMAN | pre | 2 | −0.66 | 0.01989421 | P60709 | ACTB | Actin, cytoplasmic 1 |
| 49 | 148- | KLF8_HUMAN | pre | 2 | −0.67 | 0.01886910 | O95600 | KLF8 | Krueppel-like |
| | 151 | | | | | | | | factor 8 |
| | | | diag | 2 | −0.93 | 0.04479542 | | | |
| 50 | 147 | IL12A_HUMAN | pre | 2 | −0.71 | 0.03511896 | P29459 | IL12A | Interleukin-12 |
| | | | | | | | | | subunit alpha |
| 51 | 194 | IL8_HUMAN | pre | 2 | −0.83 | 0.03511896 | P10145 | CXCL8 | Interleukin-8 |
| 52 | 156- | MK03_HUMAN | pre | 2 | −0.77 | 0.01886910 | P27361 | MAPK3 | Mitogen-activated |
| | 158 | | | | | | | | protein kinase 3 |
| 53 | 136 | CASP3_HUMAN | pre | 2 | −0.77 | 0.01672936 | P42574 | CASP3 | Caspase-3 |
| 54 | 152 | LEG4_HUMAN | pre | 2 | −0.80 | 0.03511896 | P56470 | LGALS4 | Galectin-4 |
| 55 | 159 | MUC5B_HUMAN | pre | 2 | −0.80 | 0.02047452 | Q9HC84 | MUC5B | Mucin-5B |
| 56 | 185 | VRK1_HUMAN | pre | 2 | −0.87 | 0.04772231 | Q99986 | VRK1 | Serine/threonine- |
| | | | | | | | | | protein kinase |
| | | | | | | | | | VRK1 |
| 57 | 186 | CDKN3_HUMAN | diag | 2 | −0.71 | 0.01978279 | Q16667 | CDKN3 | Cyclin-dependent |
| | | | | | | | | | kinase inhibitor 3 |
| 58 | 188- | TFP12_HUMAN | diag | 2 | −0.79 | 0.03075045 | P48307 | TFP12 | Tissue factor |
| | 189 | | | | | | | | pathway inhibitor |
| | | | | | | | | | 2 |
| 59 | 195- | ARHG2_HUMAN | pre | 1 | −0.41 | 0.03565782 | Q92974 | ARHGEF2 | Rho guanine |
| | 197 | | | | | | | | nucleotide exchange |
| | | | | | | | | | factor 2 |
| 60 | 226- | LMNA_HUMAN | pre | 1 | −0.63 | 0.03353007 | P02545 | LMNA | Prelamin-A/C |
| | 231 | | | | | | | | |
| 61 | 232 | PYR1_HUMAN | pre | 1 | −0.65 | 0.01284425 | P27708 | CAD | CAD protein |
| 62 | 214 | DAPK1_HUMAN | pre | 1 | −0.65 | 0.02261542 | P53355 | DAPK1 | Death-associated |
| | 217 | | | | | | | | protein kinase 1 |
| 63 | 213 | CUED2_HUMAN | pre | 1 | −0.70 | 0.01007946 | Q9H467 | CUEDC2 | CUE domain- |
| | | | | | | | | | containing protein 2 |
| 64 | 236 | CP1B1_HUMAN | diag | 1 | −0.56 | 0.01978279 | Q16678 | CYP1B1 | Cytochrome P450 |
| | | | | | | | | | 1B1 |
| 65 | 247 | SSR4_HUMAN | pre | 0 | −0.40 | 0.02825626 | P31391 | SSTR4 | Somatostatin |
| | | | | | | | | | receptor type 4 |
| 66 | 237 | ANGT_HUMAN | pre | 0 | −0.42 | 0.04109223 | P01019 | AGT | Angiotensinogen |
| 67 | 238- | APC_HUMAN | pre | 0 | −0.42 | 0.02825626 | P25054 | APC | Adenomatous |
| | 240 | | | | | | | | polyposis coli |
| | | | | | | | | | protein |
| 68 | 248 | TNAP3_HUMAN | pre | 0 | −0.49 | 0.03707986 | P21580 | TNFAIP3 | Tumor necrosis |
| | | | | | | | | | factor alpha- |
| | | | | | | | | | induced protein 3 |

[0430] In further studies, another larger sample cohort comprising 597 samples (230 prior surgery; 368 after surgery) with or without AKI were analyzed by a new antibody microarray release. Sample preparation, incubation and raw data acquisition was performed as described in the Methods section above. For differential analyses a linear model was fitted with LIMMA via robust M-estimation, resulting in a two-sided t-test or F-test based on moderated statistics. Proteins were defined as differential for log FC|>0.25 and an adjusted p value <0.001.

[0431] Biomarkers, which were significantly downregulated or upregulated, are depicted in table 7.

TABLE 7

| | SEQ | Uniprot entry | Qual | | | Uniprot | Gene | |
|---|---|---|---|---|---|---|---|---|
| No. | ID No. | name | score | logFC | adj. p-Val | accession | name | Protein name |
| 1 | | NFAC4_HUMAN | 6 | −0.99 | 7.10E−05 | Q14934 | NFATC4 | Nuclear factor of activated |
| | | | | | | | | T-cells |
| 2 | 13 | IFNA1_HUMAN | 5 | −0.83 | 4.20E−04 | P01562 | IFNA1; | Interferon alpha-1/13 |
| | | | | | | | IFNA13 | |
| 3 | | CD99_HUMAN | 3 | −0.52 | 3.40E−03 | P14209 | CD99 | CD99 antigen |
| 4 | No | CD99R_HUMAN | 1 | −0.31 | 5.90E−02 | | | CD99R antigen or CD99 anti- |
| | sequence | | | | | | | gen restricted |
| | available | | | | | | | |
| | | CD99R_HUMAN | 3 | −0.69 | 1.20E−03 | | | |
| | | (male only) | | | | | | |
| 5 | | CUED2_HUMAN | 3 | −0.68 | 6.40E−03 | Q9H467 | CUEDC2 | CUE domain-containing |
| | | | | | | | | protein 2 |
| 6 | | PGH2_HUMAN | 7 | −1.65 | 3.30E−08 | P35354 | PTGS2 | Prostaglandin G/H synthase |
| | | | | | | | | 2 |
| 7 | | LEG4_HUMAN | 1 | 0.20 | 1.50E−01 | P56470 | LGALS4 | Galectin-4 |
| | | LEG4_HUMAN | 5 | 0.68 | 7.00E−06 | | | |
| | | (male only) | | | | | | |
| 8 | | PRIO_HUMAN | 4 | 0.45 | 3.50E−10 | P04156 | PRNP | Major prion protein |
| | | PRIO_HUMAN | 4 | 0.51 | 1.10E−04 | Q14934 | NFATC4 | Nuclear factor of activated |
| | | (female only) | | | | | | T-cells |

[0432] During the large-scale studies, also a number of additional biomarkers was identified, which were significantly higher or lower abundant in patients with AKI. Such markers are depicted in table 8.

TABLE 8

| | SEQ | | | | | | | |
|---|---|---|---|---|---|---|---|---|
| | ID | | Qual | | | Uniprot | Gene | |
| No. | No. | Uniprot entry name | score | logFC | adj. p-Val | accession | name/Isoform | Protein name |
| 1 | 253 | CFAD_HUMAN | 6 | 0.81 | 9.10E−10 | P00746 | CFD | Complement |
| | | | | | | | | factor D |
| | 254 | CFAD_HUMAN | | | | | CFAD_HUMAN | |
| | | | | | | | aa26-253 chain | |
| | 255 | K7ERG9_HUMAN | | | | K7ERG9 | potential Isoform | |
| | | | | | | | of CFAD_HUMAN | |
| 2 | 256 | NTF4_HUMAN | 5 | −0.58 | 3.40E−05 | P34130 | NTF4 | Neurotrophin-4 |
| | 257 | NTF4_HUMAN | | | | P34130 | NTF4_HUMAN | |
| | | | | | | | aa81-210 chain | |
| | 258 | M0R0X2_HUMAN | | | | M0R0X2 | potential isoform | |
| | | | | | | | of NTF4_HUMAN | |
| 3 | 259 | IBP1_HUMAN | 7 | 1.33 | 7.20E−31 | P08833 | IGFBP1 | Insulin-like |
| | | | | | | | | growth factor- |
| | | | | | | | | binding protein 1 |
| | 260 | IBP1_HUMAN | | | | P08833 | IBP1_HUMAN | |
| | | | | | | | aa26-259 chain | |
| | 261 | C9J6H2_HUMAN | | | | C9J6H2 | potential isoform | |
| | | | | | | | of IBP1_HUMAN | |
| | 262 | C9JXF9_HUMAN | | | | C9JXF9 | potential isoform | |
| | | | | | | | of IBP1_HUMAN | |
| 4 | 263 | CYTB_HUMAN | 5 | 0.56 | 8.90E−23 | P04080 | CSTB | Cystatin-B |
| | 264 | A0A1W2PQG6_HUMAN | | | | A0A1W2PQG6 | potential isoform | |
| | | | | | | | of CYTB_HUMAN | |
| | 265 | A0A1W2PS52_HUMAN | | | | A0A1W2PS52 | potential isoform | |
| | | | | | | | of CYTB_HUMAN | |
| 5 | 266 | I18BP_HUMAN | 4 | −0.38 | 7.20E−06 | O95998 | IL18BP | Interleukin-18- |
| | | | | | | | | binding protein |
| | 267 | I18BP_HUMAN | | | | O95998 | I18BP_HUMAN | |
| | | | | | | | aa31-194 chain | |
| | 268 | I18BP_HUMAN Isoform | | | | O95998-3 | Isoform B | |
| | | B | | | | | | |
| | 269 | I18BP_HUMAN Isoform | | | | O95998-4 | Isoform D | |
| | | D | | | | | | |
| | 270 | G3V1C5_HUMAN | | | | G3V1C5 | potential isoform | |
| | | | | | | | of G3V1C5_HUMAN | |
| 6 | 271 | WFDC2_HUMAN | 5 | 0.53 | 6.0E−17 | Q14508 | WFDC2 | WAP four-disul- |
| | | | | | | | | fide core domain |
| | | | | | | | | protein 2 |
| | 272 | WFDC2_HUMAN | | | | Q14508 | WFDC2_HUMAN | |
| | | | | | | | aa31-124 chain | |
| | 273 | WFDC2_HUMAN | | | | Q14508-2 | Isoform 2 | |
| | | Isoform 2 | | | | | | |
| | 274 | WFDC2_HUMAN | | | | Q14508-3 | Isoform 3 | |
| | | Isoform 3 | | | | | | |
| | 275 | WFDC2_HUMAN | | | | Q14508-4 | Isoform 4 | |
| | | Isoform 4 | | | | | | |
| | 276 | WFDC2_HUMAN | | | | Q14508-5 | Isoform 5 | |
| | | Isoform 5 | | | | | | |
| 7 | 277 | HPT_HUMAN | 6 | −2.23 | 6.20E−15 | P00738 | HP | Haptoglobin |
| | 278 | HPT_HUMAN | | | | P00738 | HPT_HUMAN | |
| | | | | | | | aa19-406 | |
| | 279 | HPT_HUMAN | | | | P00738 | HPT_HUMAN | |
| | | | | | | | aa19-160 alpha | |
| | | | | | | | chain | |
| | 280 | HPT_HUMAN | | | | P00738 | HPT_HUMAN | |
| | | | | | | | aa162-406 beta | |
| | | | | | | | chain | |
| | 281 | HPT_HUMAN Isoform 2 | | | | P00738-2 | Isoform 2 | |
| 8 | 282 | UTER_HUMAN | 5 | 0.87 | 5.60E−17 | P11684 | SCGB1A1 | Uteroglobin |
| | 283 | UTER_HUMAN | | | | P11684 | UTER_HUMAN | |
| | | | | | | | aa22-91 chain | |
| | 284 | E9PN95_HUMAN | | | | E9PN95 | potential isoform | |
| | | | | | | | of UTER_HUMAN | |
| 9 | 285 | CH3L1_HUMAN | 5 | 0.91 | 4.70E−12 | P36222 | CHI3L1 | Chitinase-3-like |
| | | | | | | | | protein 1 |
| | 286 | CH3L1_HUMAN | | | | P36222 | CH3L1_HUMAN | |
| | | | | | | | aa 22-383 chain | |
| | 287 | H0Y3U8_HUMAN | | | | H0Y3U8 | potential isoform | |
| | | | | | | | of CH3L1_HUMAN | |
| 10 | 288 | ELAF_HUMAN | 4 | 0.58 | 5.30E−17 | P19957 | PI3 | Elafin |
| | 289 | ELAF_HUMAN | | | | P19957 | ELAF_HUMAN | |
| | | | | | | | aa 23-60 propeptide | |
| | 290 | ELAF_HUMAN | | | | P19957 | ELAF_HUMAN | |
| | | | | | | | aa61-117 chain | |
| 11 | 291 | COMP_HUMAN | 4 | 0.56 | 3.00E−15 | P49747 | COMP | Cartilage |
| | | | | | | | | oligomeric matrix |
| | | | | | | | | protein |
| | 292 | COMP_HUMAN | | | | P49747 | COMP_HUMAN | |
| | | | | | | | aa21-757 chain | |
| | 293 | COMP_HUMAN | | | | P49747-2 | Isoform 2 | |
| | | Isoform 2 | | | | | | |
| | 294 | G3XAP6_HUMAN | | | | G3XAP6 | potential isoform | |
| | | | | | | | of COMP_HUMAN | |
| 12 | 295 | IL16_HUMAN | 3 | −0.33 | 1.50E−06 | Q14005 | IL16 | Pro-interleukin-16 |
| | 296 | IL16_HUMAN | | | | Q14005 | IL16_HUMAN | |
| | | | | | | | aa1212-1332 | |
| | | | | | | | interleukin-16 | |
| | 297 | IL16_HUMAN Isoform 2 | | | | Q14005-2 | Isoform 2 | |
| | 298 | IL16_HUMAN Isoform 3 | | | | Q14005-3 | Isoform 3 | |
| | 299 | IL16_HUMAN Isoform 4 | | | | Q14005-4 | Isoform 4 | |
| 13 | 300 | ITIH1_HUMAN | 3 | −0.31 | 4.00E−06 | P19827 | ITIH1 | Inter-alpha-tryp- |
| | | | | | | | | sin inhibitor heavy |
| | | | | | | | | chain H1 |
| | 301 | ITIH1_HUMAN | | | | P19827 | ITIH1_HUMAN | |
| | | | | | | | aa35-672 Inter- | |
| | | | | | | | alpha-trypsin inhibi- | |
| | | | | | | | tor heavy chain | |
| | | | | | | | H1 | |
| | 302 | ITIH1_HUMAN | | | | P19827 | ITIH1_HUMAN | |
| | | | | | | | aa673-911 | |
| | | | | | | | propeptide | |
| | 303 | ITIH1_HUMAN Isoform | | | | P19827-2 | Isoform 2 | |
| | | 2 | | | | | | |
| | 304 | ITIH1_HUMAN Isoform | | | | P19827-3 | Isoform 3 | |
| | | 3 | | | | | | |

[0433] In some cases, the change of the log FC from predictive status to diagnostic status (i.e. delta log FC) indicates meaningful biomarkers of special interest. Such biomarkers are depicted in table 9.

TABLE 9

| Uniprot entry | | | Delta logFC | Uniprot | | |
|---|---|---|---|---|---|---|
| name | logFC pre | logFC diag | (diag-pre) | accession | Gene name | Protein name |
| NFAC4_HUMAN | −0.99 | 0.39 | 1.38 | Q14934 | NFATC4 | Nuclear factor of |
| | | | | | | activated T-cells |
| IFNA1_HUMAN | −0.83 | −0.32 | 0.51 | P01562 | IFNA1; | Interferon alpha-1/13 |
| | | | | | IFNA13 | |
| CD99_HUMAN | −0.52 | 0.01 | 0.53 | P14209 | CD99 | CD99 antigen |
| CD99R | −0.31 | 0.44 | 0.75 | P14209 | CD99 | CD99R antigen |
| CD99R (male | −0.69 | 0.38 | 1.07 | | | |
| only) | | | | | | |
| CUED2_HUMAN | −0.68 | 0.27 | 0.95 | Q9H467 | CUEDC2 | CUE domain- |
| | | | | | | containing protein 2 |
| PGH2_HUMAN | −0.42 | −1.65 | −1.23 | P35354 | PTGS2 | Prostaglandin G/H |
| | | | | | | synthase 2 |
| LEG4_HUMAN | −0.03 | 0.20 | 0.23 | P56470 | LGALS4 | Galectin-4 |
| LEG4_HUMAN | −0.43 | 0.68 | 1.11 | | | |
| (male only) | | | | | | |
| PRIO_HUMAN | −0.05 | 0.45 | 0.5 | P04156 | PRNP | Major prion protein |
| PRIO_HUMAN | 0.27 | 0.51 | 0.24 | | | |
| (female only) | | | | | | |
| CFAD_HUMAN | −0.01 | 0.81 | 0.82 | P00746 | CFD | Complement factor D |
| NTF4_HUMAN | −0.58 | −0.01 | 0.57 | P34130 | NTF4 | Neurotrophin-4 |
| IBP1_HUMAN | 0.02 | 1.33 | 1.31 | P08833 | IGFBP1 | Insulin-like growth |
| | | | | | | factor-binding protein 1 |
| CYTB_HUMAN | −0.04 | 0.56 | 0.6 | P04080 | CSTB | Cystatin-B |
| I18BP_HUMAN | −0.38 | −0.48 | −0.1 | O95998 | IL18BP | Interleukin-18-binding |
| | | | | | | protein |
| WFDC2 HUMAN | 0.04 | 0.53 | 0.49 | Q14508 | WFDC2 | WAP four-disulfide |
| | | | | | | core domain protein 2 |
| HPT_HUMAN | −0.78 | −2.23 | −1.45 | P00738 | HP | Haptoglobin |
| UTER_HUMAN | −0.42 | 0.87 | 1.29 | P11684 | SCGB1A1 | Uteroglobin |
| CH3L1 HUMAN | −0.01 | 0.91 | 0.92 | P36222 | CHI3L1 | Chitinase-3-like protein 1 |
| ELAF_HUMAN | 0.11 | 0.58 | 0.47 | P19957 | PI3 | Elafin |
| COMP_HUMAN | 0.1 | 0.56 | 0.46 | P49747 | COMP | Cartilage oligomeric |
| | | | | | | matrix protein |
| IL16_HUMAN | −0.33 | −0.06 | 0.27 | Q14005 | IL16 | Pro-interleukin-16 |
| ITIH1_HUMAN | −0.31 | −0.14 | 0.17 | P19827 | ITIH1 | Inter-alpha-trypsin |
| | | | | | | inhibitor heavy chain H1 |

### Clinical Example

[0434] AKI is a major complication in critically ill patients and after major surgeries. Particularly in cardiac surgery, patients are usually older and often have pre-existing conditions such as hypertension and diabetes mellitus. Both are risk factors for renal insufficiency. These patients are particularly at risk of developing acute kidney injury (AKI) with a frequency up to 40%. In many cases, the deterioration of kidney function is recognized with a delay.

[0435] A concrete example of everyday clinical practice is a 72-year-old female patient suffering from mitral and tricuspid valve insufficiency with long-term hypertension as the underlying disease. Before surgery the patient had a reduced renal function of 45% and the operation had to be performed with the use of a heart-lung machine and the administration of blood products is required. After surgery the patient had a volume surplus through the intravascular fluid administration of about 5 L meaning an increase of creatinine as a common clinical parameter was not recognized and thus made an early diagnosis of AKI extremely difficult. By analyzing patient's plasma before surgery using a predictive test e.g. an immuno-based Point-of-care device containing a biomarker combination of 5-10 markers, the risk profile could be determined in advance and alternative procedures for valve replacement can be discussed to prevent AKI development. Furthermore, it could be considered in the case of blood product administration whether short-term stored red cell concentrates are indicated showing low amount of free heme as a kidney damaging hemoglobin degradation product. After surgery it took 7 days of dehydration to re-assess creatinine as a renal parameter and diagnose AKI in this patient. Using a diagnostic biomarker combination shortly after surgery in a time window of 6 to 24 hours post OP the onset and severity of AKI could be detected at an early stage and medication adjusted to the renal situation. One could consider kidney stabilizing drugs and/or avoid or adjust dosages of nephrotoxic substances like antibiotics thereby improving patients outcome and preventing secondary conditions like chronic kidney disease.

### LITERATURE

[0436] Basile, D. P., Anderson, M. D., & Sutton, T. A. (2012). Pathophysiology of acute kidney injury. Comprehensive Physiology, 2(2), 1303-1353. https://doi.org/10.1002/cphy.c110041
[0437] Bellomo, R., Ronco, C., Kellum, J. A., Mehta, R. L., Palevsky, P., & Acute Dialysis Quality Initiative workgroup. (2004). Acute renal failure—definition, outcome measures, animal models, fluid therapy and information technology needs: the Second International Consensus Conference of the Acute Dialysis Quality Initiative (ADQI) Group. Critical Care (London, England), 8(4), R204-212. https://doi.org/10.1186/cc2872
[0438] Brown, J. R., Rezaee, M. E., Nichols, E. L., Marshall, E. J., Siew, E. D., & Matheny, M. E. (2016). Incidence and In-Hospital Mortality of Acute Kidney Injury (AKI) and Dialysis-Requiring AKI (AKI-D) After Cardiac Catheterization in the National Inpatient Sample. Journal of the American Heart Association, 5(3), e002739. https://doi.org/10.1161/JAHA.115.002739
[0439] Charrin, S., Jouannet, S., Boucheix, C., & Rubinstein, E. (2014). Tetraspanins at a glance. Journal of Cell Science, 127(Pt 17), 3641-3648. https://doi.org/10.1242/jcs.154906
[0440] Chuang, P. Y., & He, J. C. (2010). JAK/STAT signaling in renal diseases. Kidney International, 78(3), 231-234. https://doi.org/10.1038/ki.2010.158
[0441] Dowdy, S. M., & Wearden, S. (1983) Statistics for research. John Wiley & Sons
[0442] Drubin, D. G., & Nelson, W. J. (1996). Origins of Cell Polarity. Cell, 84(3), 335-344. https://doi.org/10.1016/50092-8674(00)81278-7
[0443] Feng, D.-F., & Doolittle, R. F. (1987). Progressive sequence alignment as a prerequisitetto correct phylogenetic trees. Journal of Molecular Evolution, 25(4), 351-360. https://doi.org/10.1007/BF02603120
[0444] Fredriksson, S., Gullberg, M., Jarvius, J., Olsson, C., Pietras, K., Gústafsdöttir, S. M., Östman, A., & Landegren, U. (2002). Protein detection using proximity-dependent DNA ligation assays. Nature Biotechnology, 20(5), 473-477. https://doi.org/10.1038/nbt0502-473
[0445] Fuhrman, D. Y., Kane-Gill, S., Goldstein, S. L., Priyanka, P., & Kellum, J. A. (2018). Acute kidney injury epidemiology, risk factors, and outcomes in critically ill patients 16-25 years of age treated in an adult intensive care unit. Annals of Intensive Care, 8(1). https://doi.org/10.1186/s13613-018-0373-y
[0446] Higgins, D. G., & Sharp, P. M. (1989). Fast and sensitive multiple sequence alignments on a microcomputer. Bioinformatics, 5(2), 151-153. https://doi.org/10.1093/bioinforrnatics/5.2.151
[0447] Hobson, C., Singhania, G., & Bihorac, A. (2015). Acute Kidney Injury in the Surgical Patient. Critical Care Clinics, 31(4), 705-723. https://doi.org/10.1016/j.ccc.2015.06.007
[0448] Hsu, M.-F., Bettaieb, A., Ito, Y., Graham, J., Havel, P. J., & Haj, F. G. (2017). Protein tyrosine phosphatase Shp2 deficiency in podocytes attenuates lipopolysaccharide-induced proteinuria. Scientific Reports, 7(1), 461. https://doi.org/10.1038/s41598-017-00564-3
[0449] Kalisvaart, M., Schlegel, A., Umbro, I., de Haan, J. E., Scalera, I., Polak, W. G., IJzermans, J. N. M., Mirza, D. F., Perera, M. T. P. R., Isaac, J. I., Ferguson, J., Mitterhofer, A. P., de Jonge, J., & Muiesan, P. (2018). The Impact of Combined Warm Ischemia Time on Development of Acute Kidney Injury in Donation After Circulatory Death Liver Transplantation: Stay Within the Golden Hour. Transplantation, 102(5), 783-793. https:/doi.org/10.1097/TP.0000000000002085
[0450] Kinsey, G. R., & Okusa, M. D. (2012). Role of leukocytes in the pathogenesis of acute kidney injury. Critical Care (London, England), 16(2), 214. https:/doi.org/10.1186/cc11228
[0451] Kogon, A., & Hingorani, S. (2010). Acute Kidney Injury in Hematopoietic Cell Transplantation. Seminars in Nephrology, 30(6), 615-626. https://doi.org/10.1016/j.semnephrol.2010.09.009
[0452] Lopes, J. A., & Jorge, S. (2013). The RIFLE and AKIN classifications for acute kidney injury: A critical and comprehensive review. Clinical Kidney Journal, 6(1), 8-14. https://doi.org/10.1093/ckj/sfs160
[0453] McEver, Rodger P. 2015. “Selectins: Initiators of Leucocyte Adhesion and Signalling at the Vascular Wall.” Cardiovascular Research 107(3):331-39.
[0454] Mehta, R. L., Kellum, J. A., Shah, S. V., Molitoris, B. A., Ronco, C., Warnock, D. G., Levin, A., & Acute Kidney Injury Network. (2007). Acute Kidney Injury Network: report of an initiative to improve outcomes in acute kidney injury. Critical Care (London, England), 11(2), R31. https://doi.org/10.1186/cc5713
[0455] Needleman, S. B., & Wunsch, C. D. (1970). A general method applicable to the search for similarities in the amino acid sequence of two proteins. Journal of Molecular Biology, 48(3), 443-453. https://doi.org/10.1016/0022-2836(70)90057-4
[0456] Nezvitsky, L., Tremblay, M. L., Takano, T., Papillon, J., & Cybulsky, A. V. (2014). Complement-mediated glomerular injury is reduced by inhibition of protein-tyrosine phosphatase 1B. American Journal of Physiology-Renal Physiology, 307(5), F634-F647. https://doi.org/10.1152/ajprenal.00191.2014
[0457] Nolan, J. P., & Sklar, L. A. (2002). Suspension array technology: Evolution of the flat-array paradigm. Trends in Biotechnology, 20(1), 9-12. https://doi.org/10.1016/S0167-7799(01)01844-3
[0458] Pang, M., Ma, L., Gong, R., Tolbert, E., Mao, H., Ponnusamy, M., Chin, Y. E., Yan, H., Dworkin, L. D., & Zhuang, S. (2010). A novel STAT3 inhibitor, S31-201, attenuates renal interstitial fibroblast activation and interstitial fibrosis in obstructive nephropathy. Kidney International, 78(3), 257-268. https://doi.org/10.1038/ki.2010.154
[0459] Pulli, T., Hoyhtys, M., Soderlund, H., & Takkinen, K. (2005). One-Step Homogeneous Immunoassay for Small Analytes. Analytical Chemistry, 77(8), 2637-2642. https://doi.org/10.1021/ac0483791
[0460] Satoh, N., Nakamura, M., Suzuki, M., Suzuki, A., Seki, G., & Horita, S. (2015). Roles of Akt and SGK1 in the Regulation of Renal Tubular Transport. BioMed Research International, 2015, 1-8. https://doi.org/10.1155/2015/971697
[0461] Smith, T. F., & Waterman, M. S. (1981). Comparison of biosequences. Advances in Applied Mathematics, 2(4), 482-489. https://doi.org/10.1016/0196-8858(81)90046-4
[0462] Wehbe, E., Brock, R., Budev, M., Xu, M., Demirjian, S., Schreiber, M. J., & Stephany, B. (2012). Short-term and long-term outcomes of acute kidney injury after lung transplantation. The Journal of Heart and Lung Transplantation, 31(3), 244-251. https://doi.org/10.1016/j.healun.2011.08.016
[0463] Wehbe, E., Duncan, A. E., Dar, G., Budev, M., & Stephany, B. (2013). Recovery from AKI and short- and long-term outcomes after lung transplantation. Clinical Journal of the American Society of Nephrology: CJASN, 8(1), 19-25. https://doi.org/10.2215/CJN.04800512

The application's sequence listing, which the Patent Office published only in electronic form, follows.

SEQUENCE LISTING (304 sequences)

SEQ ID NO: 1 - protein, 604 aa, Homo sapiens
MLARALLLCAVLALSHTANPCCSHPCQNRGVCMSVGFDQYKCDCTRTGFYGENCSTPEFLTRIKLFLKPTPNTVHYILTHFKGFWNVVNNIPFLRNAIMSYVLTSRSHLIDSPPTYNADYGYKSWEAFSNLSYYTRALPPVPDDCPTPLGVKGKKQLPDSNEIVEKLLLRRKFIPDPQGSNMMFAFFAQHFTHQFFKTDHKRGPAFTNGLGHGVDLNHIYGETLARQRKLRLFKDGKMKYQIIDGEMYPPTVKDTQAEMIYPPQVPEHLRFAVGQEVFGLVPGLMMYATIWLREHNRVCDVLKQEHPEWGDEQLFQTSRLILIGETIKIVIEDYVQHLSGYHFKLKFDPELLFNKQFQYQNRIAAEFNTLYHWHPLLPDTFQIHDQKYNYQQFIYNNSILLEHGITQFVESFTRQIAGRVAGGRNVPPAVQKVSQASIDQSRQMKYQSFNEYRKRFMLKPYESFEELTGEKEMSAELEALYGDIDAVELYPALLVEKPRPDAIFGETMVEVGAPFSLKGLMGNVICSPAYWKPSTFGGEVGFQIINTASIQSLICNNVKGCPFTSFSVPDPELIKTVTINASSSRSGLDDINPTVLLKERSTEL

SEQ ID NO: 2 - protein, 185 aa, Homo sapiens
MARGAALALLLFGLLGVLVAAPDGGFDLSDALPDNENKKPTAIPKKPSAGDDFDLGDAVVDGENDDPRPPNPPKPMPNPNPNHPSSSGSFSDADLADGVSGGEGKGGSDGGGSHRKEGEEADAPGVIPGIVGAVVVAVAGAISSFIAYQKKKLCFKENAEQGEVDMESHRNANAEPAVQRTLLEK

SEQ ID NO: 3 - protein, 160 aa, Homo sapiens
MARGAALALLLFGLLGVLVAAPDGGFDLSDALPDNENKKPTAIPKKPSAGDDFDLGDAVVDGENDDPRPPNPPKPMPNPNPNHPSSSGSFSDADLADGVSGGEGKGGSDGGGSHRKEGEEADAPGVIPGIVGAVVVAVAGAISSFIAYQKKKLCFKENDG

SEQ ID NO: 4 - protein, 169 aa, Homo sapiens
MARGAALALLLFGLLGVLVAAPDGGFDLSDALPGDDFDLGDAVVDGENDDPRPPNPPKPMPNPNPNHPSSSGSFSDADLADGVSGGEGKGGSDGGGSHRKEGEEADAPGVIPGIVGAVVVAVAGAISSFIAYQKKKLCFKENAEQGEVDMESHRNANAEPAVQRTLLEK

SEQ ID NO: 5 - protein, 257 aa, Homo sapiens
MAPAMESPTLLCVALLFFAPDGVLAVPQKPKVSLNPPWNRIFKGENVTLTCNGNNFFEVSSTKWFHNGSLSEETNSSLNIVNAKFEDSGEYKCQHQQVNESEPVYLEVFSDWLLLQASAEVVMEGQPLFLRCHGWRNWDVYKVIYYKDGEALKYWYENHNISITNATVEDSGTYYCTGKVWQLDYESEPLNITVIKAPREKYWLQFFIPLLVVILFAVDTGLFISTQQQVTFLLKIKRTRKGFRLLNPHPKPNPKNN

SEQ ID NO: 6 - protein, 335 aa, Homo sapiens
MLGIWTLLPLVLTSVARLSSKSVNAQVTDINSKGLELRKTVTTVETQNLEGLHHDGQFCHKPCPPGERKARDCTVNGDEPDCVPCQEGKEYTDKAHFSSKCRRCRLCDEGHGLEVEINCTRTQNTKCRCKPNFFCNSTVCEHCDPCTKCEHGIIKECTLTSNTKCKEEGSRSNLGWLCLLLLPIPLIVWVKRKEVQKTCRKHRKENQGSHESPTLNPETVAINLSDVDLSKYITTIAGVMTLSQVKGFVRKNGVNEAKIDEIKNDNVQDTAEQKVQLLRNWHQLHGKKEAYDTLIKDLKKANLCTLAEKIQTIILKDITSDSENSNFRNEIQSLV

SEQ ID NO: 7 - protein, 103 aa, Homo sapiens
MLGIWTLLPLVLTSVARLSSKSVNAQVTDINSKGLELRKTVTTVETQNLEGLHHDGQFCHKPCPPDVNMESSRNAHSPATPSAKRKDPDLTWGGFVFFFCQFH

SEQ ID NO: 8 - protein, 86 aa, Homo sapiens
MLGIWTLLPLVLTSVARLSSKSVNAQVTDINSKGLELRKTVTTVETQNLEGLHHDGQFCHKPCPPDVNMESSRNAHSPATPSAKRK

SEQ ID NO: 9 - protein, 149 aa, Homo sapiens
MLGIWTLLPLVLTSVARLSSKSVNAQVTDINSKGLELRKTVTTVETQNLEGLHHDGQFCHKPCPPGERKARDCTVNGDEPDCVPCQEGKEYTDKAHFSSKCRRCRLCDEGHDVNMESSRNAHSPATPSAKRKDPDLTWGGFVFFFCQFH

SEQ ID NO: 10 - protein, 132 aa, Homo sapiens
MLGIWTLLPLVLTSVARLSSKSVNAQVTDINSKGLELRKTVTTVETQNLEGLHHDGQFCHKPCPPGERKARDCTVNGDEPDCVPCQEGKEYTDKAHFSSKCRRCRLCDEGHDVNMESSRNAHSPATPSAKRK

SEQ ID NO: 11 - protein, 314 aa, Homo sapiens
MLGIWTLLPLVLTSVARLSSKSVNAQVTDINSKGLELRKTVTTVETQNLEGLHHDGQFCHKPCPPGERKARDCTVNGDEPDCVPCQEGKEYTDKAHFSSKCRRCRLCDEGHGLEVEINCTRTQNTKCRCKPNFFCNSTVCEHCDPCTKCEHGIIKECTLTSNTKCKEEVKRKEVQKTCRKHRKENQGSHESPTLNPETVAINLSDVDLSKYITTIAGVMTLSQVKGFVRKNGVNEAKIDEIKNDNVQDTAEQKVQLLRNWHQLHGKKEAYDTLIKDLKKANLCTLAEKIQTIILKDITSDSENSNFRNEIQSLV

SEQ ID NO: 12 - protein, 220 aa, Homo sapiens
MLGIWTLLPLVLTSVARLSSKSVNAQVTDINSKGLELRKTVTTVETQNLEGLHHDGQFCHKPCPPGERKARDCTVNGDEPDCVPCQEGKEYTDKAHFSSKCRRCRLCDEGHGLEVEINCTRTQNTKCRCKPNFFCNSTVCEHCDPCTKCEHGIIKECTLTSNTKCKEEGSRSNLGWLCLLLLPIPLIVWVKRKEVQKTCRKHRKENQGSHESPTLNPMLT

SEQ ID NO: 13 - protein, 189 aa, Homo sapiens
MASPFALLMVLVVLSCKSSCSLGCDLPETHSLDNRRTLMLLAQMSRISPSSCLMDRHDFGFPQEEFDGNQFQKAPAISVLHELIQQIFNLFTTKDSSAAWDEDLLDKFCTELYQQLNDLEACVMQEERVGETPLMNADSILAVKKYFRRITLYLTEKKYSPCAWEVVRAEIMRSLSLSTNLQERLRRKE

SEQ ID NO: 14 - protein, 385 aa, Homo sapiens
MAAALFVLLGFALLGTHGASGAAGFVQAPLSQQRWVGGSVELHCEAVGSPVPEIQWWFEGQGPNDTCSQLWDGARLDRVHIHATYHQHAASTISIDTLVEEDTGTYECRASNDPDRNHLTRAPRVKWVRAQAVVLVLEPGTVFTTVEDLGSKILLTCSLNDSATEVTGHRWLKGGVVLKEDALPGQKTEFKVDSDDQWGEYSCVFLPEPMGTANIQLHGPPRVKAVKSSEHINEGETAMLVCKSESVPPVTDWAWYKITDSEDKALMNGSESRFFVSSSQGRSELHIENLNMEADPGQYRCNGTSSKGSDQAIITLRVRSHLAALWPFLGIVAEVLVLVTIIFIYEKRRKPEDVLDDDDAGSAPLKSSGQHQNDKGKNVRQRNSS

SEQ ID NO: 15 - protein, 269 aa, Homo sapiens
MAAALFVLLGFALLGTHGASGAAGTVFTTVEDLGSKILLTCSLNDSATEVTGHRWLKGGVVLKEDALPGQKTEFKVDSDDQWGEYSCVFLPEPMGTANIQLHGPPRVKAVKSSEHINEGETAMLVCKSESVPPVTDWAWYKITDSEDKALMNGSESRFFVSSSQGRSELHIENLNMEADPGQYRCNGTSSKGSDQAIITLRVRSHLAALWPFLGIVAEVLVLVTIIFIYEKRRKPEDVLDDDDAGSAPLKSSGQHQNDKGKNVRQRNSS

SEQ ID NO: 16 - protein, 176 aa, Homo sapiens
MGTANIQLHGPPRVKAVKSSEHINEGETAMLVCKSESVPPVTDWAWYKITDSEDKALMNGSESRFFVSSSQGRSELHIENLNMEADPGQYRCNGTSSKGSDQAIITLRVRSHLAALWPFLGIVAEVLVLVTIIFIYEKRRKPEDVLDDDDAGSAPLKSSGQHQNDKGKNVRQRNSS

SEQ ID NO: 17 - protein, 205 aa, Homo sapiens
MKQSDASPQERVDSDDQWGEYSCVFLPEPMGTANIQLHGPPRVKAVKSSEHINEGETAMLVCKSESVPPVTDWAWYKITDSEDKALMNGSESRFFVSSSQGRSELHIENLNMEADPGQYRCNGTSSKGSDQAIITLRVRSHLAALWPFLGIVAEVLVLVTIIFIYEKRRKPEDVLDDDDAGSAPLKSSGQHQNDKGKNVRQRNSS

SEQ ID NO: 18 - protein, 99 aa, Homo sapiens
MKASAALLCLLLTAAAFSPQGLAQPVGINTSTTCCYRFINKKIPKQRLESYRRTTSSHCPREAVIFKTKLDKEICADPTQKWVQDFMKHLDKKTQTPKL

SEQ ID NO: 19 - protein, 228 aa, Homo sapiens
MPVKGGTKCIKYLLFGFNFIFWLAGIAVLAIGLWLRFDSQTKSIFEQETNNNNSSFYTGVYILIGAGALMMLVGFLGCCGAVQESQCMLGLFFGFLLVIFAIEIAAAIWGYSHKDEVIKEVQEFYKDTYNKLKTKDEPQRETLKAIHYALNCCGLAGGVEQFISDICPKKDVLETFTVKSCPDAIKEVFDNKFHIIGAVGIGIAVVMIFGMIFSMILCCAIRRNREMV

SEQ ID NO: 20 - protein, 259 aa, Homo sapiens
MAALMRSKDSSCCLLLLAAVLMVESSQIGSSRAKLNSIKSSLGGETPGQAANRSAGMYQGLAFGGSKKGKNLGQAYPCSSDKECEVGRYCHSPHQGSSACMVCRRKKKRCHRDGMCCPSTRCNNGICIPVTESILTPHIPALDGTRHRDRNHGHYSNHDLGWQNLGRPHTKMSHIKGHEGDPCLRSSDCIEGFCCARHFWTKICKPVLHQGEVCTKQRKKGSHGLEIFQRCDCAKGLSCKVWKDATYSSKARLHVCQKI

SEQ ID NO: 21 - protein, 724 aa, Homo sapiens
MSFPKAPLKRFNDPSGCAPSPGAYDVKTLEVLKGPVSFQKSQRFKQQKESKQNLNVDKDTTLPASARKVKSSESKESQKNDKDLKILEKEIRVLLQERGAQDRRIQDLETELEKMEARLNAALREKTSLSANNATLEKQLIELTRTNELLKSKFSENGNQKNLRILSLELMKLRNKRETKMRGMMAKQEGMEMKLQVTQRSLEESQGKIAQLEGKLVSIEKEKIDEKSETEKLLEYIEEISCASDQVEKYKLDIAQLEENLKEKNDEILSLKQSLEENIVILSKQVEDLNVKCQLLEKEKEDHVNRNREHNENLNAEMQNLKQKFILEQQEREKLQQKELQIDSLLQQEKELSSSLHQKLCSFQEEMVKEKNLFEEELKQTLDELDKLQQKEEQAERLVKQLEEEAKSRAEELKLLEEKLKGKEAELEKSSAAHTQATLLLQEKYDSMVQSLEDVTAQFESYKALTASEIEDLKLENSSLQEKAAKAGKNAEDVQHQILATESSNQEYVRMLLDLQTKSALKETEIKEITVSFLQKITDLQNQLKQQEEDFRKQLEDEEGRKAEKENTTAELTEEINKWRLLYEELYNKTKPFQLQLDAFEVEKQALLNEHGAAQEQLNKIRDSYAKLLGHQNLKQKIKHVVKLKDENSQLKSEVSKLRCQLAKKKQSETKLQEELNKVLGIKHFDPSKAFHHESKENFALKTPLKEGNTNCYRAPMECQESWK

SEQ ID NO: 22 - protein, 709 aa, Homo sapiens
MSFPKAPLKRFNDPSGCAPSPGAYDVKTLEVLKGPVSFQKSQRFKQQKESKQNLNVDKDTTLPASARKVKSSESKIRVLLQERGAQDRRIQDLETELEKMEARLNAALREKTSLSANNATLEKQLIELTRTNELLKSKFSENGNQKNLRILSLELMKLRNKRETKMRGMMAKQEGMEMKLQVTQRSLEESQGKIAQLEGKLVSIEKEKIDEKSETEKLLEYIEEISCASDQVEKYKLDIAQLEENLKEKNDEILSLKQSLEENIVILSKQVEDLNVKCQLLEKEKEDHVNRNREHNENLNAEMQNLKQKFILEQQEREKLQQKELQIDSLLQQEKELSSSLHQKLCSFQEEMVKEKNLFEEELKQTLDELDKLQQKEEQAERLVKQLEEEAKSRAEELKLLEEKLKGKEAELEKSSAAHTQATLLLQEKYDSMVQSLEDVTAQFESYKALTASEIEDLKLENSSLQEKAAKAGKNAEDVQHQILATESSNQEYVRMLLDLQTKSALKETEIKEITVSFLQKITDLQNQLKQQEEDFRKQLEDEEGRKAEKENTTAELTEEINKWRLLYEELYNKTKPFQLQLDAFEVEKQALLNEHGAAQEQLNKIRDSYAKLLGHQNLKQKIKHVVKLKDENSQLKSEVSKLRCQLAKKKQSETKLQEELNKVLGIKHFDPSKAFHHESKENFALKTPLKEGNTNCYRAPMECQESWK

SEQ ID NO: 23 - protein, 725 aa, Homo sapiens
MSFPKAPLKRFNDPSGCAPSPGAYDVKTLEVLKGPVSFQKSQRFKQQKESKQNLNVDKDTTLPASARKVKSSESKKESQKNDKDLKILEKEIRVLLQERGAQDRRIQDLETELEKMEARLNAALREKTSLSANNATLEKQLIELTRTNELLKSKFSENGNQKNLRILSLELMKLRNKRETKMRGMMAKQEGMEMKLQVTQRSLEESQGKIAQLEGKLVSIEKEKIDEKSETEKLLEYIEEISCASDQVEKYKLDIAQLEENLKEKNDEILSLKQSLEENIVILSKQVEDLNVKCQLLEKEKEDHVNRNREHNENLNAEMQNLKQKFILEQQEREKLQQKELQIDSLLQQEKELSSSLHQKLCSFQEEMVKEKNLFEEELKQTLDELDKLQQKEEQAERLVKQLEEEAKSRAEELKLLEEKLKGKEAELEKSSAAHTQATLLLQEKYDSMVQSLEDVTAQFESYKALTASEIEDLKLENSSLQEKAAKAGKNAEDVQHQILATESSNQEYVRMLLDLQTKSALKETEIKEITVSFLQKITDLQNQLKQQEEDFRKQLEDEEGRKAEKENTTAELTEEINKWRLLYEELYNKTKPFQLQLDAFEVEKQALLNEHGAAQEQLNKIRDSYAKLLGHQNLKQKIKHVVKLKDENSQLKSEVSKLRCQLAKKKQSETKLQEELNKVLGIKHFDPSKAFHHESKENFALKTPLKEGNTNCYRAPMECQESWK

SEQ ID NO: 24 - protein, 638 aa, Homo sapiens
MTLLIRVLLQERGAQDRRIQDLETELEKMEARLNAALREKTSLSANNATLEKQLIELTRTNELLKSKFSENGNQKNLRILSLELMKLRNKRETKMRGMMAKQEGMEMKLQVTQRSLEESQGKIAQLEGKLVSIEKEKIDEKSETEKLLEYIEEISCASDQVEKYKLDIAQLEENLKEKNDEILSLKQSLEENIVILSKQVEDLNVKCQLLEKEKEDHVNRNREHNENLNAEMQNLKQKFILEQQEREKLQQKELQIDSLLQQEKELSSSLHQKLCSFQEEMVKEKNLFEEELKQTLDELDKLQQKEEQAERLVKQLEEEAKSRAEELKLLEEKLKGKEAELEKSSAAHTQATLLLQEKYDSMVQSLEDVTAQFESYKALTASEIEDLKLENSSLQEKAAKAGKNAEDVQHQILATESSNQEYVRMLLDLQTKSALKETEIKEITVSFLQKITDLQNQLKQQEEDFRKQLEDEEGRKAEKENTTAELTEEINKWRLLYEELYNKTKPFQLQLDAFEVEKQALLNEHGAAQEQLNKIRDSYAKLLGHQNLKQKIKHVVKLKDENSQLKSEVSKLRCQLAKKKQSETKLQEELNKVLGIKHFDPSKAFHHESKENFALKTPLKEGNTNCYRAPMECQESWK

SEQ ID NO: 25 - protein, 193 aa, Homo sapiens
MAAEPVEDNCINFVAMKFIDNTLYFIAEDDENLESDYFGKLESKLSVIRNLNDQVLFIDQGNRPLFEDMTDSDCRDNAPRTIFIISMYKDSQPRGMAVTISVKCEKISTLSCENKIISFKEMNPPDNIKDTKSDIIFFQRSVPGHDNKMQFESSSYEGYFLACEKERDLFKLILKKEDELGDRSIMFTVQNED

SEQ ID NO: 26 - protein, 189 aa, Homo sapiens
MAAEPVEDNCINFVAMKFIDNTLYFIENLESDYFGKLESKLSVIRNLNDQVLFIDQGNRPLFEDMTDSDCRDNAPRTIFIISMYKDSQPRGMAVTISVKCEKISTLSCENKIISFKEMNPPDNIKDTKSDIIFFQRSVPGHDNKMQFESSSYEGYFLACEKERDLFKLILKKEDELGDRSIMFTVQNED

SEQ ID NO: 27 - protein, 177 aa, Homo sapiens
MFHVSFRYIFGLPPLILVLLPVASSDCDIEGKDGKQYESVLMVSIDQLLDSMKEIGSNCLNNEFNFFKRHICDANKEGMFLFRAARKLRQFLKMNSTGDFDLHLLKVSEGTTILLNCTGQVKGRKPAALGEAQPTKSLEENKSLKEQKKLNDLCFLKRLLQEIKTCWNKILMGTKEH

SEQ ID NO: 28 - protein, 133 aa, Homo sapiens
MFHVSFRYIFGLPPLILVLLPVASSDCDIEGKDGKQYESVLMVSIDQLLDSMKEIGSNCLNNEFNFFKRHICDANKVKGRKPAALGEAQPTKSLEENKSLKEQKKLNDLCFLKRLLQEIKTCWNKILMGTKEH

SEQ ID NO: 29 - protein, 64 aa, Homo sapiens
MKEIGSNCLNNEFNFFKRHICDANKEENKSLKEQKKLNDLCFLKRLLQEIKTCWNKILMGTKEH

SEQ ID NO: 30 - protein, 253 aa, Homo sapiens
MANLGCWMLVLFVATWSDLGLCKKRPKPGGWNTGGSRYPGQGSPGGNRYPPQGGGGWGQPHGGGWGQPHGGGWGQPHGGGWGQPHGGGWGQGGGTHSQWNKPSKPKTNMKHMAGAAAAGAVVGGLGGYMLGSAMSRPIIHFGSDYEDRYYRENMHRYPNQVYYRPMDEYSNQNNFVHDCVNITIKQHTVTTTTKGENFTETDVKMMERVVEQMCITQYERESQAYYQRGSSMVLFSSPPVILLISFLIFLIVG

SEQ ID NO: 31 - protein, 1306 aa, Homo sapiens
MTMYLWLKLLAFGFAFLDTEVFVTGQSPTPSPTGLTTAKMPSVPLSSDPLPTHTTAFSPASTFERENDFSETTTSLSPDNTSTQVSPDSLDNASAFNTTGVSSVQTPHLPTHADSQTPSAGTDTQTFSGSAANAKLNPTPGSNAISDVPGERSTASTFPTDPVSPLTTTLSLAHHSSAALPARTSNTTITANTSDAYLNASETTTLSPSGSAVISTTTIATTPSKPTCDEKYANITVDYLYNKETKLFTAKLNVNENVECGNNTCTNNEVHNLTECKNASVSISHNSCTAPDKTLILDVPPGVEKFQLHDCTQVEKADTTICLKWKNIETFTCDTQNITYRFQCGNMIFDNKEIKLENLEPEHEYKCDSEILYNNHKFTNASKIIKTDFGSPGEPQIIFCRSEAAHQGVITWNPPQRSFHNFTLCYIKETEKDCLNLDKNLIKYDLQNLKPYTKYVLSLHAYIIAKVQRNGSAAMCHFTTKSAPPSQVWNMTVSMTSDNSMHVKCRPPRDRNGPHERYHLEVEAGNTLVRNESHKNCDFRVKDLQYSTDYTFKAYFHNGDYPGEPFILHHSTSYNSKALIAFLAFLIIVTSIALLVVLYKIYDLHKKRSCNLDEQQELVERDDEKQLMNVEPIHADILLETYKRKIADEGRLFLAEFQSIPRVFSKFPIKEARKPFNQNKNRYVDILPYDYNRVELSEINGDAGSNYINASYIDGFKEPRKYIAAQGPRDETVDDFWRMIWEQKATVIVMVTRCEEGNRNKCAEYWPSMEEGTRAFGDVVVKINQHKRCPDYIIQKLNIVNKKEKATGREVTHIQFTSWPDHGVPEDPHLLLKLRRRVNAFSNFFSGPIVVHCSAGVGRTGTYIGIDAMLEGLEAENKVDVYGYVVKLRRQRCLMVQVEAQYILIHQALVEYNQFGETEVNLSELHPYLHNMKKRDPPSEPSPLEAEFQRLPSYRSWRTQHIGNQEENKSKNRNSNVIPYDYNRVPLKHELEMSKESEHDSDESSDDDSDSEEPSKYINASFIMSYWKPEVMIAAQGPLKETIGDFWQMIFQRKVKVIVMLTELKHGDQEICAQYWGEGKQTYGDIEVDLKDTDKSSTYTLRVFELRHSKRKDSRTVYQYQYTNWSVEQLPAEPKELISMIQVVKQKLPQKNSSEGNKHHKSTPLLIHCRDGSQQTGIFCALLNLLESAETEEVVDIFQVVKALRKARPGMVSTFEQYQFLYDVIASTYPAQNGQVKKNNHQEDKIEFDNEVDKVKQDANCVNPLGAPEKLPEAKEQAEGSEPTSGTEGPEHSVNGPASPALNQGS

SEQ ID NO: 32 - protein, 1145 aa, Homo sapiens
MTMYLWLKLLAFGFAFLDTEVFVTGQSPTPSPTDAYLNASETTTLSPSGSAVISTTTIATTPSKPTCDEKYANITVDYLYNKETKLFTAKLNVNENVECGNNTCTNNEVHNLTECKNASVSISHNSCTAPDKTLILDVPPGVEKFQLHDCTQVEKADTTICLKWKNIETFTCDTQNITYRFQCGNMIFDNKEIKLENLEPEHEYKCDSEILYNNHKFTNASKIIKTDFGSPGEPQIIFCRSEAAHQGVITWNPPQRSFHNFTLCYIKETEKDCLNLDKNLIKYDLQNLKPYTKYVLSLHAYIIAKVQRNGSAAMCHFTTKSAPPSQVWNMTVSMTSDNSMHVKCRPPRDRNGPHERYHLEVEAGNTLVRNESHKNCDFRVKDLQYSTDYTFKAYFHNGDYPGEPFILHHSTSYNSKALIAFLAFLIIVTSIALLVVLYKIYDLHKKRSCNLDEQQELVERDDEKQLMNVEPIHADILLETYKRKIADEGRLFLAEFQSIPRVFSKFPIKEARKPFNQNKNRYVDILPYDYNRVELSEINGDAGSNYINASYIDGFKEPRKYIAAQGPRDETVDDFWRMIWEQKATVIVMVTRCEEGNRNKCAEYWPSMEEGTRAFGDVVVKINQHKRCPDYIIQKLNIVNKKEKATGREVTHIQFTSWPDHGVPEDPHLLLKLRRRVNAFSNFFSGPIVVHCSAGVGRTGTYIGIDAMLEGLEAENKVDVYGYVVKLRRQRCLMVQVEAQYILIHQALVEYNQFGETEVNLSELHPYLHNMKKRDPPSEPSPLEAEFQRLPSYRSWRTQHIGNQEENKSKNRNSNVIPYDYNRVPLKHELEMSKESEHDSDESSDDDSDSEEPSKYINASFIMSYWKPEVMIAAQGPLKETIGDFWQMIFQRKVKVIVMLTELKHGDQEICAQYWGEGKQTYGDIEVDLKDTDKSSTYTLRVFELRHSKRKDSRTVYQYQYTNWSVEQLPAEPKELISMIQVVKQKLPQKNSSEGNKHHKSTPLLIHCRDGSQQTGIFCALLNLLESAETEEVVDIFQVVKALRKARPGMVSTFEQYQFLYDVIASTYPAQNGQVKKNNHQEDKIEFDNEVDKVKQDANCVNPLGAPEKLPEAKEQAEGSEPTSGTEGPEHSVNGPASPALNQGS

SEQ ID NO: 33 - protein, 1258 aa, Homo sapiens
MTMYLWLKLLAFGFAFLDTEVFVTGQSPTPSPTGLTTAKMPSVPLSSDPLPTHTTAFSPASTFERENDFSETTTSLSPDNTSTQVSPDSLDNASAFNTTGVSSVQTPHLPTHADSQTPSAGTDTQTFSGSAANAKLNPTPGSNAISDAYLNASETTTLSPSGSAVISTTTIATTPSKPTCDEKYANITVDYLYNKETKLFTAKLNVNENVECGNNTCTNNEVHNLTECKNASVSISHNSCTAPDKTLILDVPPGVEKFQLHDCTQVEKADTTICLKWKNIETFTCDTQNITYRFQCGNMIFDNKEIKLENLEPEHEYKCDSEILYNNHKFTNASKIIKTDFGSPGEPQIIFCRSEAAHQGVITWNPPQRSFHNFTLCYIKETEKDCLNLDKNLIKYDLQNLKPYTKYVLSLHAYIIAKVQRNGSAAMCHFTTKSAPPSQVWNMTVSMTSDNSMHVKCRPPRDRNGPHERYHLEVEAGNTLVRNESHKNCDFRVKDLQYSTDYTFKAYFHNGDYPGEPFILHHSTSYNSKALIAFLAFLIIVTSIALLVVLYKIYDLHKKRSCNLDEQQELVERDDEKQLMNVEPIHADILLETYKRKIADEGRLFLAEFQSIPRVFSKFPIKEARKPFNQNKNRYVDILPYDYNRVELSEINGDAGSNYINASYIDGFKEPRKYIAAQGPRDETVDDFWRMIWEQKATVIVMVTRCEEGNRNKCAEYWPSMEEGTRAFGDVVVKINQHKRCPDYIIQKLNIVNKKEKATGREVTHIQFTSWPDHGVPEDPHLLLKLRRRVNAFSNFFSGPIVVHCSAGVGRTGTYIGIDAMLEGLEAENKVDVYGYVVKLRRQRCLMVQVEAQYILIHQALVEYNQFGETEVNLSELHPYLHNMKKRDPPSEPSPLEAEFQRLPSYRSWRTQHIGNQEENKSKNRNSNVIPYDYNRVPLKHELEMSKESEHDSDESSDDDSDSEEPSKYINASFIMSYWKPEVMIAAQGPLKETIGDFWQMIFQRKVKVIVMLTELKHGDQEICAQYWGEGKQTYGDIEVDLKDTDKSSTYTLRVFELRHSKRKDSRTVYQYQYTNWSVEQLPAEPKELISMIQVVKQKLPQKNSSEGNKHHKSTPLLIHCRDGSQQTGIFCALLNLLESAETEEVVDIFQVVKALRKARPGMVSTFEQYQFLYDVIASTYPAQNGQVKKNNHQEDKIEFDNEVDKVKQDANCVNPLGAPEKLPEAKEQAEGSEPTSGTEGPEHSVNGPASPALNQGS

SEQ ID NO: 34 - protein, 1259 aa, Homo sapiens
MTMYLWLKLLAFGFAFLDTEVFVTGQSPTPSPTGLTTAKMPSVPLSSDPLPTHTTAFSPASTFERENDFSETTTSLSPDNTSTQVSPDSLDNASAFNTTDVPGERSTASTFPTDPVSPLTTTLSLAHHSSAALPARTSNTTITANTSDAYLNASETTTLSPSGSAVISTTTIATTPSKPTCDEKYANITVDYLYNKETKLFTAKLNVNENVECGNNTCTNNEVHNLTECKNASVSISHNSCTAPDKTLILDVPPGVEKFQLHDCTQVEKADTTICLKWKNIETFTCDTQNITYRFQCGNMIFDNKEIKLENLEPEHEYKCDSEILYNNHKFTNASKIIKTDFGSPGEPQIIFCRSEAAHQGVITWNPPQRSFHNFTLCYIKETEKDCLNLDKNLIKYDLQNLKPYTKYVLSLHAYIIAKVQRNGSAAMCHFTTKSAPPSQVWNMTVSMTSDNSMHVKCRPPRDRNGPHERYHLEVEAGNTLVRNESHKNCDFRVKDLQYSTDYTFKAYFHNGDYPGEPFILHHSTSYNSKALIAFLAFLIIVTSIALLVVLYKIYDLHKKRSCNLDEQQELVERDDEKQLMNVEPIHADILLETYKRKIADEGRLFLAEFQSIPRVFSKFPIKEARKPFNQNKNRYVDILPYDYNRVELSEINGDAGSNYINASYIDGFKEPRKYIAAQGPRDETVDDFWRMIWEQKATVIVMVTRCEEGNRNKCAEYWPSMEEGTRAFGDVVVKINQHKRCPDYIIQKLNIVNKKEKATGREVTHIQFTSWPDHGVPEDPHLLLKLRRRVNAFSNFFSGPIVVHCSAGVGRTGTYIGIDAMLEGLEAENKVDVYGYVVKLRRQRCLMVQVEAQYILIHQALVEYNQFGETEVNLSELHPYLHNMKKRDPPSEPSPLEAEFQRLPSYRSWRTQHIGNQEENKSKNRNSNVIPYDYNRVPLKHELEMSKESEHDSDESSDDDSDSEEPSKYINASFIMSYWKPEVMIAAQGPLKETIGDFWQMIFQRKVKVIVMLTELKHGDQEICAQYWGEGKQTYGDIEVDLKDTDKSSTYTLRVFELRHSKRKDSRTVYQYQYTNWSVEQLPAEPKELISMIQVVKQKLPQKNSSEGNKHHKSTPLLIHCRDGSQQTGIFCALLNLLESAETEEVVDIFQVVKALRKARPGMVSTFEQYQFLYDVIASTYPAQNGQVKKNNHQEDKIEFDNEVDKVKQDANCVNPLGAPEKLPEAKEQAEGSEPTSGTEGPEHSVNGPASPALNQGS

SEQ ID NO: 35 - protein, 1240 aa, Homo sapiens
MTMYLWLKLLAFGFAFLDTEVFVTGQSPTPSPTGVSSVQTPHLPTHADSQTPSAGTDTQTFSGSAANAKLNPTPGSNAISDVPGERSTASTFPTDPVSPLTTTLSLAHHSSAALPARTSNTTITANTSDAYLNASETTTLSPSGSAVISTTTIATTPSKPTCDEKYANITVDYLYNKETKLFTAKLNVNENVECGNNTCTNNEVHNLTECKNASVSISHNSCTAPDKTLILDVPPGVEKFQLHDCTQVEKADTTICLKWKNIETFTCDTQNITYRFQCGNMIFDNKEIKLENLEPEHEYKCDSEILYNNHKFTNASKIIKTDFGSPGEPQIIFCRSEAAHQGVITWNPPQRSFHNFTLCYIKETEKDCLNLDKNLIKYDLQNLKPYTKYVLSLHAYIIAKVQRNGSAAMCHFTTKSAPPSQVWNMTVSMTSDNSMHVKCRPPRDRNGPHERYHLEVEAGNTLVRNESHKNCDFRVKDLQYSTDYTFKAYFHNGDYPGEPFILHHSTSYNSKALIAFLAFLIIVTSIALLVVLYKIYDLHKKRSCNLDEQQELVERDDEKQLMNVEPIHADILLETYKRKIADEGRLFLAEFQSIPRVFSKFPIKEARKPFNQNKNRYVDILPYDYNRVELSEINGDAGSNYINASYIDGFKEPRKYIAAQGPRDETVDDFWRMIWEQKATVIVMVTRCEEGNRNKCAEYWPSMEEGTRAFGDVVVKINQHKRCPDYIIQKLNIVNKKEKATGREVTHIQFTSWPDHGVPEDPHLLLKLRRRVNAFSNFFSGPIVVHCSAGVGRTGTYIGIDAMLEGLEAENKVDVYGYVVKLRRQRCLMVQVEAQYILIHQALVEYNQFGETEVNLSELHPYLHNMKKRDPPSEPSPLEAEFQRLPSYRSWRTQHIGNQEENKSKNRNSNVIPYDYNRVPLKHELEMSKESEHDSDESSDDDSDSEEPSKYINASFIMSYWKPEVMIAAQGPLKETIGDFWQMIFQRKVKVIVMLTELKHGDQEICAQYWGEGKQTYGDIEVDLKDTDKSSTYTLRVFELRHSKRKDSRTVYQYQYTNWSVEQLPAEPKELISMIQVVKQKLPQKNSSEGNKHHKSTPLLIHCRDGSQQTGIFCALLNLLESAETEEVVDIFQVVKALRKARPGMVSTFEQYQFLYDVIASTYPAQNGQVKKNNHQEDKIEFDNEVDKVKQDANCVNPLGAPEKLPEAKEQAEGSEPTSGTEGPEHSVNGPASPALNQGS

SEQ ID NO: 36 - protein, 1211 aa, Homo sapiens
MTMYLWLKLLAFGFAFLDTEVFVTGQSPTPSPTGLTTAKMPSVPLSSDPLPTHTTAFSPASTFERENDFSETTTSLSPDNTSTQVSPDSLDNASAFNTTDAYLNASETTTLSPSGSAVISTTTIATTPSKPTCDEKYANITVDYLYNKETKLFTAKLNVNENVECGNNTCTNNEVHNLTECKNASVSISHNSCTAPDKTLILDVPPGVEKFQLHDCTQVEKADTTICLKWKNIETFTCDTQNITYRFQCGNMIFDNKEIKLENLEPEHEYKCDSEILYNNHKFTNASKIIKTDFGSPGEPQIIFCRSEAAHQGVITWNPPQRSFHNFTLCYIKETEKDCLNLDKNLIKYDLQNLKPYTKYVLSLHAYIIAKVQRNGSAAMCHFTTKSAPPSQVWNMTVSMTSDNSMHVKCRPPRDRNGPHERYHLEVEAGNTLVRNESHKNCDFRVKDLQYSTDYTFKAYFHNGDYPGEPFILHHSTSYNSKALIAFLAFLIIVTSIALLVVLYKIYDLHKKRSCNLDEQQELVERDDEKQLMNVEPIHADILLETYKRKIADEGRLFLAEFQSIPRVFSKFPIKEARKPFNQNKNRYVDILPYDYNRVELSEINGDAGSNYINASYIDGFKEPRKYIAAQGPRDETVDDFWRMIWEQKATVIVMVTRCEEGNRNKCAEYWPSMEEGTRAFGDVVVKINQHKRCPDYIIQKLNIVNKKEKATGREVTHIQFTSWPDHGVPEDPHLLLKLRRRVNAFSNFFSGPIVVHCSAGVGRTGTYIGIDAMLEGLEAENKVDVYGYVVKLRRQRCLMVQVEAQYILIHQALVEYNQFGETEVNLSELHPYLHNMKKRDPPSEPSPLEAEFQRLPSYRSWRTQHIGNQEENKSKNRNSNVIPYDYNRVPLKHELEMSKESEHDSDESSDDDSDSEEPSKYINASFIMSYWKPEVMIAAQGPLKETIGDFWQMIFQRKVKVIVMLTELKHGDQEICAQYWGEGKQTYGDIEVDLKDTDKSSTYTLRVFELRHSKRKDSRTVYQYQYTNWSVEQLPAEPKELISMIQVVKQKLPQKNSSEGNKHHKSTPLLIHCRDGSQQTGIFCALLNLLESAETEEVVDIFQVVKALRKARPGMVSTFEQYQFLYDVIASTYPAQNGQVKKNNHQEDKIEFDNEVDKVKQDANCVNPLGAPEKLPEAKEQAEGSEPTSGTEGPEHSVNGPASPALNQGS

SEQ ID NO: 37 - protein, 1192 aa, Homo sapiens
MTMYLWLKLLAFGFAFLDTEVFVTGQSPTPSPTGVSSVQTPHLPTHADSQTPSAGTDTQTFSGSAANAKLNPTPGSNAISDAYLNASETTTLSPSGSAVISTTTIATTPSKPTCDEKYANITVDYLYNKETKLFTAKLNVNENVECGNNTCTNNEVHNLTECKNASVSISHNSCTAPDKTLILDVPPGVEKFQLHDCTQVEKADTTICLKWKNIETFTCDTQNITYRFQCGNMIFDNKEIKLENLEPEHEYKCDSEILYNNHKFTNASKIIKTDFGSPGEPQIIFCRSEAAHQGVITWNPPQRSFHNFTLCYIKETEKDCLNLDKNLIKYDLQNLKPYTKYVLSLHAYIIAKVQRNGSAAMCHFTTKSAPPSQVWNMTVSMTSDNSMHVKCRPPRDRNGPHERYHLEVEAGNTLVRNESHKNCDFRVKDLQYSTDYTFKAYFHNGDYPGEPFILHHSTSYNSKALIAFLAFLIIVTSIALLVVLYKIYDLHKKRSCNLDEQQELVERDDEKQLMNVEPIHADILLETYKRKIADEGRLFLAEFQSIPRVFSKFPIKEARKPFNQNKNRYVDILPYDYNRVELSEINGDAGSNYINASYIDGFKEPRKYIAAQGPRDETVDDFWRMIWEQKATVIVMVTRCEEGNRNKCAEYWPSMEEGTRAFGDVVVKINQHKRCPDYIIQKLNIVNKKEKATGREVTHIQFTSWPDHGVPEDPHLLLKLRRRVNAFSNFFSGPIVVHCSAGVGRTGTYIGIDAMLEGLEAENKVDVYGYVVKLRRQRCLMVQVEAQYILIHQALVEYNQFGETEVNLSELHPYLHNMKKRDPPSEPSPLEAEFQRLPSYRSWRTQHIGNQEENKSKNRNSNVIPYDYNRVPLKHELEMSKESEHDSDESSDDDSDSEEPSKYINASFIMSYWKPEVMIAAQGPLKETIGDFWQMIFQRKVKVIVMLTELKHGDQEICAQYWGEGKQTYGDIEVDLKDTDKSSTYTLRVFELRHSKRKDSRTVYQYQYTNWSVEQLPAEPKELISMIQVVKQKLPQKNSSEGNKHHKSTPLLIHCRDGSQQTGIFCALLNLLESAETEEVVDIFQVVKALRKARPGMVSTFEQYQFLYDVIASTYPAQNGQVKKNNHQEDKIEFDNEVDKVKQDANCVNPLGAPEKLPEAKEQAEGSEPTSGTEGPEHSVNGPASPALNQGS

SEQ ID NO: 38 - protein, 1193 aa, Homo sapiens
MTMYLWLKLLAFGFAFLDTEVFVTGQSPTPSPTDVPGERSTASTFPTDPVSPLTTTLSLAHHSSAALPARTSNTTITANTSDAYLNASETTTLSPSGSAVISTTTIATTPSKPTCDEKYANITVDYLYNKETKLFTAKLNVNENVECGNNTCTNNEVHNLTECKNASVSISHNSCTAPDKTLILDVPPGVEKFQLHDCTQVEKADTTICLKWKNIETFTCDTQNITYRFQCGNMIFDNKEIKLENLEPEHEYKCDSEILYNNHKFTNASKIIKTDFGSPGEPQIIFCRSEAAHQGVITWNPPQRSFHNFTLCYIKETEKDCLNLDKNLIKYDLQNLKPYTKYVLSLHAYIIAKVQRNGSAAMCHFTTKSAPPSQVWNMTVSMTSDNSMHVKCRPPRDRNGPHERYHLEVEAGNTLVRNESHKNCDFRVKDLQYSTDYTFKAYFHNGDYPGEPFILHHSTSYNSKALIAFLAFLIIVTSIALLVVLYKIYDLHKKRSCNLDEQQELVERDDEKQLMNVEPIHADILLETYKRKIADEGRLFLAEFQSIPRVFSKFPIKEARKPFNQNKNRYVDILPYDYNRVELSEINGDAGSNYINASYIDGFKEPRKYIAAQGPRDETVDDFWRMIWEQKATVIVMVTRCEEGNRNKCAEYWPSMEEGTRAFGDVVVKINQHKRCPDYIIQKLNIVNKKEKATGREVTHIQFTSWPDHGVPEDPHLLLKLRRRVNAFSNFFSGPIVVHCSAGVGRTGTYIGIDAMLEGLEAENKVDVYGYVVKLRRQRCLMVQVEAQYILIHQALVEYNQFGETEVNLSELHPYLHNMKKRDPPSEPSPLEAEFQRLPSYRSWRTQHIGNQEENKSKNRNSNVIPYDYNRVPLKHELEMSKESEHDSDESSDDDSDSEEPSKYINASFIMSYWKPEVMIAAQGPLKETIGDFWQMIFQRKVKVIVMLTELKHGDQEICAQYWGEGKQTYGDIEVDLKDTDKSSTYTLRVFELRHSKRKDSRTVYQYQYTNWSVEQLPAEPKELISMIQVVKQKLPQKNSSEGNKHHKSTPLLIHCRDGSQQTGIFCALLNLLESAETEEVVDIFQVVKALRKARPGMVSTFEQYQFLYDVIASTYPAQNGQVKKNNHQEDKIEFDNEVDKVKQDANCVNPLGAPEKLPEAKEQAEGSEPTSGTEGPEHSVNGPASPALNQGS

SEQ ID NO: 39 - protein, 412 aa, Homo sapiens
MPLQLLLLLILLGPGNSLQLWDTWADEAEKALGPLLARDRRQATEYEYLDYDFLPETEPPEMLRNSTDTTPLTGPGTPESTTVEPAARRSTGLDAGGAVTELTTELANMGNLSTDSAAMEIQTTQPAATEAQTTQPVPTEAQTTPLAATEAQTTRLTATEAQTTPLAATEAQTTPPAATEAQTTQPTGLEAQTTAPAAMEAQTTAPAAMEAQTTPPAAMEAQTTQTTAMEAQTTAPEATEAQTTQPTATEAQTTPLAAMEALSTEPSATEALSMEPTTKRGLFIPFSVSSVTHKGIPMAASNLSVNYPVGAPDHISVKQCLLAILILALVATIFFVCTVVLAVRLSRKGHMYPVRNYSPTEMVCISSLLPDGGEGPSATANGGLSKAKSPGLTPEPREDREGDDLTLHSFLP

SEQ ID NO: 40 - protein, 428 aa, Homo sapiens
MAVGASGLEGDKMAGAMPLQLLLLLILLGPGNSLQLWDTWADEAEKALGPLLARDRRQATEYEYLDYDFLPETEPPEMLRNSTDTTPLTGPGTPESTTVEPAARRSTGLDAGGAVTELTTELANMGNLSTDSAAMEIQTTQPAATEAQTTQPVPTEAQTTPLAATEAQTTRLTATEAQTTPLAATEAQTTPPAATEAQTTQPTGLEAQTTAPAAMEAQTTAPAAMEAQTTPPAAMEAQTTQTTAMEAQTTAPEATEAQTTQPTATEAQTTPLAAMEALSTEPSATEALSMEPTTKRGLFIPFSVSSVTHKGIPMAASNLSVNYPVGAPDHISVKQCLLAILILALVATIFFVCTVVLAVRLSRKGHMYPVRNYSPTEMVCISSLLPDGGEGPSATANGGLSKAKSPGLTPEPREDREGDDLTLHSFLP

SEQ ID NO: 41 - protein, 240 aa, Homo sapiens
MEESVVRPSVFVVDGQTDIPFTRLGRSHRRQSCSVARVGLGLLLLLMGAGLAVQGWFLLQLHWRLGEMVTRLPDGPAGSWEQLIQERRSHEVNPAAHLTGANSSLTGSGGPLLWETQLGLAFLRGLSYHDGALVVTKAGYYYIYSKVQLGGVGCPLGLASTITHGLYKRTPRYPEELELLVSQQSPCGRATSSSRVWWDSSFLGGVVHLEAGEKVVVRVLDERLVRLRDGTRSYFGAFMV

SEQ ID NO: 42 - protein, 204 aa, Homo sapiens
MEESVVRPSVFVVDGQTDIPFTRLGRSHRRQSCSVARDGPAGSWEQLIQERRSHEVNPAAHLTGANSSLTGSGGPLLWETQLGLAFLRGLSYHDGALVVTKAGYYYIYSKVQLGGVGCPLGLASTITHGLYKRTPRYPEELELLVSQQSPCGRATSSSRVWWDSSFLGGVVHLEAGEKVVVRVLDERLVRLRDGTRSYFGAFMV

SEQ ID NO: 43 - protein, 1531 aa, Homo sapiens
MEVSPLQPVNENMQVNKIKKNEDAKKRLSVERIYQKKTQLEHILLRPDTYIGSVELVTQQMWVYDEDVGINYREVTFVPGLYKIFDEILVNAADNKQRDPKMSCIRVTIDPENNLISIWNNGKGIPVVEHKVEKMYVPALIFGQLLTSSNYDDDEKKVTGGRNGYGAKLCNIFSTKFTVETASREYKKMFKQTWMDNMGRAGEMELKPFNGEDYTCITFQPDLSKFKMQSLDKDIVALMVRRAYDIAGSTKDVKVFLNGNKLPVKGFRSYVDMYLKDKLDETGNSLKVIHEQVNHRWEVCLTMSEKGFQQISFVNSIATSKGGRHVDYVADQIVTKLVDVVKKKNKGGVAVKAHQVKNHMWIFVNALIENPTFDSQTKENMTLQPKSFGSTCQLSEKFIKAAIGCGIVESILNWVKFKAQVQLNKKCSAVKHNRIKGIPKLDDANDAGGRNSTECTLILTEGDSAKTLAVSGLGVVGRDKYGVFPLRGKILNVREASHKQIMENAEINNIIKIVGLQYKKNYEDEDSLKTLRYGKIMIMTDQDQDGSHIKGLLINFIHHNWPSLLRHRFLEEFITPIVKVSKNKQEMAFYSLPEFEEWKSSTPNHKKWKVKYYKGLGTSTSKEAKEYFADMKRHRIQFKYSGPEDDAAISLAFSKKQIDDRKEWLTNFMEDRRQRKLLGLPEDYLYGQTTTYLTYNDFINKELILFSNSDNERSIPSMVDGLKPGQRKVLFTCFKRNDKREVKVAQLAGSVAEMSSYHHGEMSLMMTIINLAQNFVGSNNLNLLQPIGQFGTRLHGGKDSASPRYIFTMLSSLARLLFPPKDDHTLKFLYDDNQRVEPEWYIPIIPMVLINGAEGIGTGWSCKIPNFDVREIVNNIRRLMDGEEPLPMLPSYKNFKGTIEELAPNQYVISGEVAILNSTTIEISELPVRTWTQTYKEQVLEPMLNGTEKTPPLITDYREYHTDTTVKFVVKMTEEKLAEAERVGLHKVFKLQTSLTCNSMVLFDHVGCLKKYDTVLDILRDFFELRLKYYGLRKEWLLGMLGAESAKLNNQARFILEKIDGKIIIENKPKKELIKVLIQRGYDSDPVKAWKEAQQKVPDEEENEESDNEKETEKSDSVTDSGPTFNYLLDMPLWYLTKEKKDELCRLRNEKEQELDTLKRKSPSDLWKEDLATFIEELEAVEAKEKQDEQVGLPGKGGKAKGKKTQMAEVLPSPRGQRVIPRITIEMKAEAEKKNKKKIKNENTEGSPQEDGVELEGLKQRLEKKQKREPGTKTKKQTTLAFKPIKKGKKRNPWSDSESDRSSDESNFDVPPRETEPRRAATKTKFTMDLDSDEDFSDFDEKTDDEDFVPSDASPPKTKTSPKLSNKELKPQKSVVSDLEADDVKGSVPLSSSPPATHFPDETEITNPVPKKNVTVKKTAAKSQSSTSTTGAKKRAAPKGTKRDPALNSGVSQKPDPAKTKNRRKRKPSTSDDSDSNFEKIVSKAVTSKKSKGESDDFHMDFDSAVAPRAKSVRAKKPIKYLEESDEDDLF

SEQ ID NO: 44 - protein, 1557 aa, Homo sapiens
MEVSPLQPVNENMQVNKIKKNEDAKKRLSVERIYQKKTQLEHILLRPDTYIGSVELVTQQMWVYDEDVGINYREVTFVPGLYKIFDEILVNAADNKQRDPKMSCIRVTIDPENNLISIWNNGKGIPVVEHKVEKMYVPALIFGQLLTSSNYDDDEKKVTGGRNGYGAKLCNIFSTKFTVETASREYKKMFKQTWMDNMGRAGEMELKPFNGEDYTCITFQPDLSKFKMQSLDKDIVALMVRRAYDIAGSTKDVKVFLNGNKLPVKGFRSYVDMYLKDKLDETGNSLKVIHEQVNHRWEVCLTMSEKGFQQISFVNSIATSKGGRHVDYVADQIVTKLVDVVKKKNKGGVAVKAHQVKNHMWIFVNALIENPTFDSQTKENMTLQPKSFGSTCQLSEKFIKAHLYSRFLIDPFFPNMIPNMIFSFSKAAIGCGIVESILNWVKFKAQVQLNKKCSAVKHNRIKGIPKLDDANDAGGRNSTECTLILTEGDSAKTLAVSGLGVVGRDKYGVFPLRGKILNVREASHKQIMENAEINNIIKIVGLQYKKNYEDEDSLKTLRYGKIMIMTDQDQDGSHIKGLLINFIHHNWPSLLRHRFLEEFITPIVKVSKNKQEMAFYSLPEFEEWKSSTPNHKKWKVKYYKGLGTSTSKEAKEYFADMKRHRIQFKYSGPEDDAAISLAFSKKQIDDRKEWLTNFMEDRRQRKLLGLPEDYLYGQTTTYLTYNDFINKELILFSNSDNERSIPSMVDGLKPGQRKVLFTCFKRNDKREVKVAQLAGSVAEMSSYHHGEMSLMMTIINLAQNFVGSNNLNLLQPIGQFGTRLHGGKDSASPRYIFTMLSSLARLLFPPKDDHTLKFLYDDNQRVEPEWYIPIIPMVLINGAEGIGTGWSCKIPNFDVREIVNNIRRLMDGEEPLPMLPSYKNFKGTIEELAPNQYVISGEVAILNSTTIEISELPVRTWTQTYKEQVLEPMLNGTEKTPPLITDYREYHTDTTVKFVVKMTEEKLAEAERVGLHKVFKLQTSLTCNSMVLFDHVGCLKKYDTVLDILRDFFELRLKYYGLRKEWLLGMLGAESAKLNNQARFILEKIDGKIIIENKPKKELIKVLIQRGYDSDPVKAWKEAQQKVPDEEENEESDNEKETEKSDSVTDSGPTFNYLLDMPLWYLTKEKKDELCRLRNEKEQELDTLKRKSPSDLWKEDLATFIEELEAVEAKEKQDEQVGLPGKGGKAKGKKTQMAEVLPSPRGQRVIPRITIEMKAEAEKKNKKKIKNENTEGSPQEDGVELEGLKQRLEKKQKREPGTKTKKQTTLAFKPIKKGKKRNPWSDSESDRSSDESNFDVPPRETEPRRAATKTKFTMDLDSDEDFSDFDEKTDDEDFVPSDASPPKTKTSPKLSNKELKPQKSVVSDLEADDVKGSVPLSSSPPATHFPDETEITNPVPKKNVTVKKTAAKSQSSTSTTGAKKRAAPKGTKRDPALNSGVSQKPDPAKTKNRRKRKPSTSDDSDSNFEKIVSKAVTSKKSKGESDDFHMDFDSAVAPRAKSVRAKKPIKYLEESDEDDLF

SEQ ID NO: 45 - protein, 1567 aa, Homo sapiens
MEVSPLQPVNENMQVNKIKKNEDAKKRLSVERIYQKKTQLEHILLRPDTYIGSVELVTQQMWVYDEDVGINYREVTFVPGLYKIFDEILVNAADNKQRDPKMSCIRVTIDPENNLISIWNNGKGIPVVEHKVEKMYVPALIFGQLLTSSNYDDDEKKVTGGRNGYGAKLCNIFSTKFTVETASREYKKMFKQTWMDNMGRAGEMELKPFNGEDYTCITFQPDLSKFKMQSLDKDIVALMVRRAYDIAGSTKDVKVFLNGNKLPVKGFRSYVDMYLKDKLDETGNSLKVIHEQVNHRWEVCLTMSEKGFQQISFVNSIATSKSSKYWSSRKSKQHILLNFFVLFKFINDAFFGICPFKGGRHVDYVADQIVTKLVDVVKKKNKGGVAVKAHQVKNHMWIFVNALIENPTFDSQTKENMTLQPKSFGSTCQLSEKFIKAAIGCGIVESILNWVKFKAQVQLNKKCSAVKHNRIKGIPKLDDANDAGGRNSTECTLILTEGDSAKTLAVSGLGVVGRDKYGVFPLRGKILNVREASHKQIMENAEINNIIKIVGLQYKKNYEDEDSLKTLRYGKIMIMTDQDQDGSHIKGLLINFIHHNWPSLLRHRFLEEFITPIVKVSKNKQEMAFYSLPEFEEWKSSTPNHKKWKVKYYKGLGTSTSKEAKEYFADMKRHRIQFKYSGPEDDAAISLAFSKKQIDDRKEWLTNFMEDRRQRKLLGLPEDYLYGQTTTYLTYNDFINKELILFSNSDNERSIPSMVDGLKPGQRKVLFTCFKRNDKREVKVAQLAGSVAEMSSYHHGEMSLMMTIINLAQNFVGSNNLNLLQPIGQFGTRLHGGKDSASPRYIFTMLSSLARLLFPPKDDHTLKFLYDDNQRVEPEWYIPIIPMVLINGAEGIGTGWSCKIPNFDVREIVNNIRRLMDGEEPLPMLPSYKNFKGTIEELAPNQYVISGEVAILNSTTIEISELPVRTWTQTYKEQVLEPMLNGTEKTPPLITDYREYHTDTTVKFVVKMTEEKLAEAERVGLHKVFKLQTSLTCNSMVLFDHVGCLKKYDTVLDILRDFFELRLKYYGLRKEWLLGMLGAESAKLNNQARFILEKIDGKIIIENKPKKELIKVLIQRGYDSDPVKAWKEAQQKVPDEEENEESDNEKETEKSDSVTDSGPTFNYLLDMPLWYLTKEKKDELCRLRNEKEQELDTLKRKSPSDLWKEDLATFIEELEAVEAKEKQDEQVGLPGKGGKAKGKKTQMAEVLPSPRGQRVIPRITIEMKAEAEKKNKKKIKNENTEGSPQEDGVELEGLKQRLEKKQKREPGTKTKKQTTLAFKPIKKGKKRNPWSDSESDRSSDESNFDVPPRETEPRRAATKTKFTMDLDSDEDFSDFDEKTDDEDFVPSDASPPKTKTSPKLSNKELKPQKSVVSDLEADDVKGSVPLSSSPPATHFPDETEITNPVPKKNVTVKKTAAKSQSSTSTTGAKKRAAPKGTKRDPALNSGVSQKPDPAKTKNRRKRKPSTSDDSDSNFEKIVSKAVTSKKSKGESDDFHMDFDSAVAPRAKSVRAKKPIKYLEESDEDDLF

SEQ ID NO: 46 - protein, 1612 aa, Homo sapiens
MEVSPLQPVNENMQVNKIKKNEDAKKRLSVERIYQKKTQLEHILLRPDTYIGSVELVTQQMWVYDEDVGINYREVTFVPGLYKIFDEILVNAADNKQRDPKMSCIRVTIDPENNLISIWNNGKGIPVVEHKVEKMYVPALIFGQLLTSSNYDDDEKKVTGGRNGYGAKLCNIFSTKFTVETASREYKKMFKQTWMDNMGRAGEMELKPFNGEDYTCITFQPDLSKFKMQSLDKDIVALMVRRAYDIAGSTKDVKVFLNGNKLPVKGFRSYVDMYLKDKLDETGNSLKVIHEQVNHRWEVCLTMSEKGFQQISFVNSIATSKGGRHVDYVADQIVTKLVDVVKKKNKGGVAVKAHQRELCNGAILAHCNLRLMGSSDSPASASRVAGIAGGCHHTQLIFVFLVETGFHHVGQAGLERLTSGDPPASASQSSGITDVKVKNHMWIFVNALIENPTFDSQTKENMTLQPKSFGSTCQLSEKFIKAAIGCGIVESILNWVKFKAQVQLNKKCSAVKHNRIKGIPKLDDANDAGGRNSTECTLILTEGDSAKTLAVSGLGVVGRDKYGVFPLRGKILNVREASHKQIMENAEINNIIKIVGLQYKKNYEDEDSLKTLRYGKIMIMTDQDQDGSHIKGLLINFIHHNWPSLLRHRFLEEFITPIVKVSKNKQEMAFYSLPEFEEWKSSTPNHKKWKVKYYKGLGTSTSKEAKEYFADMKRHRIQFKYSGPEDDAAISLAFSKKQIDDRKEWLTNFMEDRRQRKLLGLPEDYLYGQTTTYLTYNDFINKELILFSNSDNERSIPSMVDGLKPGQRKVLFTCFKRNDKREVKVAQLAGSVAEMSSYHHGEMSLMMTIINLAQNFVGSNNLNLLQPIGQFGTRLHGGKDSASPRYIFTMLSSLARLLFPPKDDHTLKFLYDDNQRVEPEWYIPIIPMVLINGAEGIGTGWSCKIPNFDVREIVNNIRRLMDGEEPLPMLPSYKNFKGTIEELAPNQYVISGEVAILNSTTIEISELPVRTWTQTYKEQVLEPMLNGTEKTPPLITDYREYHTDTTVKFVVKMTEEKLAEAERVGLHKVFKLQTSLTCNSMVLFDHVGCLKKYDTVLDILRDFFELRLKYYGLRKEWLLGMLGAESAKLNNQARFILEKIDGKIIIENKPKKELIKVLIQRGYDSDPVKAWKEAQQKVPDEEENEESDNEKETEKSDSVTDSGPTFNYLLDMPLWYLTKEKKDELCRLRNEKEQELDTLKRKSPSDLWKEDLATFIEELEAVEAKEKQDEQVGLPGKGGKAKGKKTQMAEVLPSPRGQRVIPRITIEMKAEAEKKNKKKIKNENTEGSPQEDGVELEGLKQRLEKKQKREPGTKTKKQTTLAFKPIKKGKKRNPWSDSESDRSSDESNFDVPPRETEPRRAATKTKFTMDLDSDEDFSDFDEKTDDEDFVPSDASPPKTKTSPKLSNKELKPQKSVVSDLEADDVKGSVPLSSSPPATHFPDETEITNPVPKKNVTVKKTAAKSQSSTSTTGAKKRAAPKGTKRDPALNSGVSQKPDPAKTKNRRKRKPSTSDDSDSNFEKIVSKAVTSKKSKGESDDFHMDFDSAVAPRAKSVRAKKPIKYLEESDEDDLF

SEQ ID NO: 47 - protein, 247 aa, Homo sapiens
MTILFLTMVISYFGCMKAAPMKEANIRGQGGLAYPGVRTHGTLESVNGPKAGSRGLTSLADTFEHVIEELLDEDQKVRPNEENNKDADLYTSRVMLSSQVPLEPPLLFLLEEYKNYLDAANMSMRVRRHSDPARRGELSVCDSISEWVTAADKKTAVDMSGGTVTVLEKVPVSKGQLKQYFYETKCNPMGYTKEGCRGIDKRHWNSQCRTTQSYVRALTMDSKKRIGWRFIRIDTSCVCTLTIKRGR

SEQ ID NO: 48 - protein, 255 aa, Homo sapiens
MFHQVRRVMTILFLTMVISYFGCMKAAPMKEANIRGQGGLAYPGVRTHGTLESVNGPKAGSRGLTSLADTFEHVIEELLDEDQKVRPNEENNKDADLYTSRVMLSSQVPLEPPLLFLLEEYKNYLDAANMSMRVRRHSDPARRGELSVCDSISEWVTAADKKTAVDMSGGTVTVLEKVPVSKGQLKQYFYETKCNPMGYTKEGCRGIDKRHWNSQCRTTQSYVRALTMDSKKRIGWRFIRIDTSCVCTLTIKRGR

SEQ ID NO: 49 - protein, 262 aa, Homo sapiens
MQSREEEWFHQVRRVMTILFLTMVISYFGCMKAAPMKEANIRGQGGLAYPGVRTHGTLESVNGPKAGSRGLTSLADTFEHVIEELLDEDQKVRPNEENNKDADLYTSRVMLSSQVPLEPPLLFLLEEYKNYLDAANMSMRVRRHSDPARRGELSVCDSISEWVTAADKKTAVDMSGGTVTVLEKVPVSKGQLKQYFYETKCNPMGYTKEGCRGIDKRHWNSQCRTTQSYVRALTMDSKKRIGWRFIRIDTSCVCTLTIKRGR

SEQ ID NO: 50 - protein, 329 aa, Homo sapiens
MCGATSFLHECTRLILVTTQNAEFLQKGLQVHTCFGVYPHASVWHDCASQKKGCAVYLHVSVEFNKLIPENGFIKFHQVRRVMTILFLTMVISYFGCMKAAPMKEANIRGQGGLAYPGVRTHGTLESVNGPKAGSRGLTSLADTFEHVIEELLDEDQKVRPNEENNKDADLYTSRVMLSSQVPLEPPLLFLLEEYKNYLDAANMSMRVRRHSDPARRGELSVCDSISEWVTAADKKTAVDMSGGTVTVLEKVPVSKGQLKQYFYETKCNPMGYTKEGCRGIDKRHWNSQCRTTQSYVRALTMDSKKRIGWRFIRIDTSCVCTLTIKRGR

SEQ ID NO: 51 - protein, 276 aa, Homo sapiens
MLCAISLCARVRKLRSAGRCGKFHQVRRVMTILFLTMVISYFGCMKAAPMKEANIRGQGGLAYPGVRTHGTLESVNGPKAGSRGLTSLADTFEHVIEELLDEDQKVRPNEENNKDADLYTSRVMLSSQVPLEPPLLFLLEEYKNYLDAANMSMRVRRHSDPARRGELSVCDSISEWVTAADKKTAVDMSGGTVTVLEKVPVSKGQLKQYFYETKCNPMGYTKEGCRGIDKRHWNSQCRTTQSYVRALTMDSKKRIGWRFIRIDTSCVCTLTIKRGR

SEQ ID NO: 52 - protein, 479 aa, Homo sapiens
MDFSRNLYDIGEQLDSEDLASLKFLSLDYIPQRKQEPIKDALMLFQRLQEKRMLEESNLSFLKELLFRINRLDLLITYLNTRKEEMERELQTPGRAQISAYRVMLYQISEEVSRSELRSFKFLLQEEISKCKLDDDMNLLDIFIEMEKRVILGEGKLDILKRVCAQINKSLLKIINDYEEFSKERSSSLEGSPDEFSNGEELCGVMTISDSPREQDSESQTLDKVYQMKSKPRGYCLIINNHNFAKAREKVPKLHSIRDRNGTHLDAGALTTTFEELHFEIKPHDDCTVEQIYEILKIYQLMDHSNMDCFICCILSHGDKGIIYGTDGQEAPIYELTSQFTGLKCPSLAGKPKVFFIQACQGDNYQKGIPVETDSEEQPYLEMDLSSPQTRYIPDEADFLLGMATVNNCVSYRNPAEGTWYIQSLCQSLRERCPRGDDILTILTEVNYEVSNKDDKKNMGKQMPQPTFTLRKKLVFPSD

SEQ ID NO: 53 - protein, 464 aa, Homo sapiens
MDFSRNLYDIGEQLDSEDLASLKFLSLDYIPQRKQEPIKDALMLFQRLQEKRMLEESNLSFLKELLFRINRLDLLITYLNTRKEEMERELQTPGRAQISAYRVMLYQISEEVSRSELRSFKFLLQEEISKCKLDDDMNLLDIFIEMEKRVILGEGKLDILKRVCAQINKSLLKIINDYEEFSKGEELCGVMTISDSPREQDSESQTLDKVYQMKSKPRGYCLIINNHNFAKAREKVPKLHSIRDRNGTHLDAGALTTTFEELHFEIKPHDDCTVEQIYEILKIYQLMDHSNMDCFICCILSHGDKGIIYGTDGQEAPIYELTSQFTGLKCPSLAGKPKVFFIQACQGDNYQKGIPVETDSEEQPYLEMDLSSPQTRYIPDEADFLLGMATVNNCVSYRNPAEGTWYIQSLCQSLRERCPRGDDILTILTEVNYEVSNKDDKKNMGKQMPQPTFTLRKKLVFPSD

SEQ ID NO: 54 - protein, 395 aa, Homo sapiens
MDFSRNLYDIGEQLDSEDLASLKFLSLDYIPQRKQEPIKDALMLFQRLQEKRMLEESNLSFLKELLFRINRLDLLITYLNTRKEEMERELQTPGRAQISAYRVMLYQISEEVSRSELRSFKFLLQEEISKCKLDDDMNLLDIFIEMEKRVILGEGKLDILKRVCAQINKSLLKIINDYEEFSKGALTTTFEELHFEIKPHDDCTVEQIYEILKIYQLMDHSNMDCFICCILSHGDKGIIYGTDGQEAPIYELTSQFTGLKCPSLAGKPKVFFIQACQGDNYQKGIPVETDSEEQPYLEMDLSSPQTRYIPDEADFLLGMATVNNCVSYRNPAEGTWYIQSLCQSLRERCPRGDDILTILTEVNYEVSNKDDKKNMGKQMPQPTFTLRKKLVFPSD

SEQ ID NO: 55 - protein, 496 aa, Homo sapiens
MDFSRNLYDIGEQLDSEDLASLKFLSLDYIPQRKQEPIKDALMLFQRLQEKRMLEESNLSFLKELLFRINRLDLLITYLNTRKEEMERELQTPGRAQISAYRFHFCRMSWAEANSQCQTQSVPFWRRVDHLLIRVMLYQISEEVSRSELRSFKFLLQEEISKCKLDDDMNLLDIFIEMEKRVILGEGKLDILKRVCAQINKSLLKIINDYEEFSKGEELCGVMTISDSPREQDSESQTLDKVYQMKSKPRGYCLIINNHNFAKAREKVPKLHSIRDRNGTHLDAGALTTTFEELHFEIKPHDDCTVEQIYEILKIYQLMDHSNMDCFICCILSHGDKGIIYGTDGQEAPIYELTSQFTGLKCPSLAGKPKVFFIQACQGDNYQKGIPVETDSEEQPYLEMDLSSPQTRYIPDEADFLLGMATVNNCVSYRNPAEGTWYIQSLCQSLRERCPRGDDILTILTEVNYEVSNKDDKKNMGKQMPQPTFTLRKKLVFPSD

SEQ ID NO: 56 - protein, 235 aa, Homo sapiens
MDFSRNLYDIGEQLDSEDLASLKFLSLDYIPQRKQEPIKDALMLFQRLQEKRMLEESNLSFLKELLFRINRLDLLITYLNTRKEEMERELQTPGRAQISAYRVMLYQISEEVSRSELRSFKFLLQEEISKCKLDDDMNLLDIFIEMEKRVILGEGKLDILKRVCAQINKSLLKIINDYEEFSKERSSSLEGSPDEFSNDFGQSLPNEKQTSGILSDHQQSQFCKSTGESAQTSQH

SEQ ID NO: 57 - protein, 220 aa, Homo sapiens
MDFSRNLYDIGEQLDSEDLASLKFLSLDYIPQRKQEPIKDALMLFQRLQEKRMLEESNLSFLKELLFRINRLDLLITYLNTRKEEMERELQTPGRAQISAYRVMLYQISEEVSRSELRSFKFLLQEEISKCKLDDDMNLLDIFIEMEKRVILGEGKLDILKRVCAQINKSLLKIINDYEEFSKDFGQSLPNEKQTSGILSDHQQSQFCKSTGESAQTSQH

SEQ ID NO: 58 - protein, 276 aa, Homo sapiens
MDFSRNLYDIGEQLDSEDLASLKFLSLDYIPQRKQEPIKDALMLFQRLQEKRMLEESNLSFLKELLFRINRLDLLITYLNTRKEEMERELQTPGRAQISAYRVMLYQISEEVSRSELRSFKFLLQEEISKCKLDDDMNLLDIFIEMEKRVILGEGKLDILKRVCAQINKSLLKIINDYEEFSKERSSSLEGSPDEFSNGEELCGVMTISDSPREQDSESQTLDKVYQMKSKPRGYCLIINNHNFAKAREKVPKLHSIRDRNGTHLDAGTVEPKREK

SEQ ID NO: 59 - protein, 261 aa, Homo sapiens
MDFSRNLYDIGEQLDSEDLASLKFLSLDYIPQRKQEPIKDALMLFQRLQEKRMLEESNLSFLKELLFRINRLDLLITYLNTRKEEMERELQTPGRAQISAYRVMLYQISEEVSRSELRSFKFLLQEEISKCKLDDDMNLLDIFIEMEKRVILGEGKLDILKRVCAQINKSLLKIINDYEEFSKGEELCGVMTISDSPREQDSESQTLDKVYQMKSKPRGYCLIINNHNFAKAREKVPKLHSIRDRNGTHLDAGTVEPKREK

SEQ ID NO: 60 - protein, 538 aa, Homo sapiens
MEGGRRARVVIESKRNFFLGAFPTPFPAEHVELGRLGDSETAMVPGKGGADYILLPFKKMDFSRNLYDIGEQLDSEDLASLKFLSLDYIPQRKQEPIKDALMLFQRLQEKRMLEESNLSFLKELLFRINRLDLLITYLNTRKEEMERELQTPGRAQISAYRVMLYQISEEVSRSELRSFKFLLQEEISKCKLDDDMNLLDIFIEMEKRVILGEGKLDILKRVCAQINKSLLKIINDYEEFSKERSSSLEGSPDEFSNGEELCGVMTISDSPREQDSESQTLDKVYQMKSKPRGYCLIINNHNFAKAREKVPKLHSIRDRNGTHLDAGALTTTFEELHFEIKPHDDCTVEQIYEILKIYQLMDHSNMDCFICCILSHGDKGIIYGTDGQEAPIYELTSQFTGLKCPSLAGKPKVFFIQACQGDNYQKGIPVETDSEEQPYLEMDLSSPQTRYIPDEADFLLGMATVNNCVSYRNPAEGTWYIQSLCQSLRERCPRGDDILTILTEVNYEVSNKDDKKNMGKQMPQPTFTLRKKLVFPSD

SEQ ID NO: 61 - protein, 97 aa, Homo sapiens
MKVSAALLWLLLIAAAFSPQGLAGPASVPTTCCFNLANRKIPLQRLESYRRITSGKCPQKAVIFKTKLAKDICADPKKKWVQDSMKYLDQKSPTPKP

SEQ ID NO: 62 - protein, 92 aa, Homo sapiens
MQVSTAALAVLLCTMALCNQFSASLAADTPTACCFSYTSRQIPQNFIADYFETSSQCSKPGVIFLTKRSRQVCADPSEEWVQKYVSDLELSA

SEQ ID NO: 63 - protein, 91 aa, Homo sapiens
MKVSAAALAVILIATALCAPASASPYSSDTTPCCFAYIARPLPRAHIKEYFYTSGKCSNPAVVFVTRKNRQVCANPEKKWVREYINSLEMS

SEQ ID NO: 64 - protein, 375 aa, Homo sapiens
MERASCLLLLLLPLVHVSATTPEPCELDDEDFRCVCNFSEPQPDWSEAFQCVSAVEVEIHAGGLNLEPFLKRVDADADPRQYADTVKALRVRRLTVGAAQVPAQLLVGALRVLAYSRLKELTLEDLKITGTMPPLPLEATGLALSSLRLRNVSWATGRSWLAELQQWLKPGLKVLSIAQAHSPAFSCEQVRAFPALTSLDLSDNPGLGERGLMAALCPHKFPAIQNLALRNTGMETPTGVCAALAAAGVQPHSLDLSHNSLRATVNPSAPRCMWSSALNSLNLSFAGLEQVPKGLPAKLRVLDLSCNRLNRAPQPDELPEVDNLTLDGNPFLVPGTALPHEGSMNSGVVPACARSTLSVGVSGTLVLLQGARGFA

SEQ ID NO: 65 - protein, 371 aa, Homo sapiens
MGRLVLLWGAAVFLLGGWMALGQGGAAEGVQIQIIYFNLETVQVTWNASKYSRTNLTFHYRFNGDEAYDQCTNYLLQEGHTSGCLLDAEQRDDILYFSIRNGTHPVFTASRWMVYYLKPSSPKHVRFSWHQDAVTVTCSDLSYGDLLYEVQYRSPFDTEWQSKQENTCNVTIEGLDAEKCYSFWVRVKAMEDVYGPDTYPSDWSEVTCWQRGEIRDACAETPTPPKPKLSKFILISSLAILLMVSLLLLSLWKLWRVKKFLIPSVPDPKSIFPGLFEIHQGNFQEWITDTQNVAHLHKMAGAEQESGPEEPLVVQLAKTEAESPRMLDPQTEEKEASGGSLQLPHQPLQGGDVVTIGGFTFVMNDRSYVAL

SEQ ID NO: 66 - protein, 233 aa, Homo sapiens
MGRLVLLWGAAVFLLGGWMALGQGGAAEGVQIQIIYFNLETVQVTWNASKYSRTNLTFHYRFNGDEAYDQCTNYLLQEGHTSGCLLDAEQRDDILYFSIRNGTHPVFTASRWMVYYLKPSSPKHVRFSWHQDAVTVTCSDLSYGDLLYEVQYRSPFDTEWQTQSRSVTQAGVQWCDLCLLQPSPPRFKRFSCLSLPSSWDYRHPPPRLANFCIISRDGVSPCWPGWSRTCDLR

SEQ ID NO: 67 - protein, 259 aa, Homo sapiens
MVYYLKPSSPKHVRFSWHQDAVTVTCSDLSYGDLLYEVQYRSPFDTEWQSKQENTCNVTIEGLDAEKCYSFWVRVKAMEDVYGPDTYPSDWSEVTCWQRGEIRDACAETPTPPKPKLSKFILISSLAILLMVSLLLLSLWKLWRVKKFLIPSVPDPKSIFPGLFEIHQGNFQEWITDTQNVAHLHKMAGAEQESGPEEPLVVQLAKTEAESPRMLDPQTEEKEASGGSLQLPHQPLQGGDVVTIGGFTFVMNDRSYVAL

SEQ ID NO: 68 - protein, 586 aa, Homo sapiens
MATATPVPPRMGSRAGGPTTPLSPTRLSRLQEKEELRELNDRLAVYIDKVRSLETENSALQLQVTEREEVRGRELTGLKALYETELADARRALDDTARERAKLQIELGKCKAEHDQLLLNYAKKESDLNGAQIKLREYEAALNSKDAALATALGDKKSLEGDLEDLKDQIAQLEASLAAAKKQLADETLLKVDLENRCQSLTEDLEFRKSMYEEEINETRRKHETRLVEVDSGRQIEYEYKLAQALHEMREQHDAQVRLYKEELEQTYHAKLENARLSSEMNTSTVNSAREELMESRMRIESLSSQLSNLQKESRACLERIQELEDLLAKEKDNSRRMLTDKEREMAEIRDQMQQQLNDYEQLLDVKLALDMEISAYRKLLEGEEERLKLSPSPSSRVTVSRASSSRSVRTTRGKRKRVDVEESEASSSVSISHSASATGNVCIEEIDVDGKFIRLKNTSEQDQPMGGWEMIRKIGDTSVSYKYTSRYVLKAGQTVTIWAANAGVTASPPTDLIWKNQNSWGTGEDVKVILKNSQGEEVAQRSTVFKTTIPEEEEEEEEAAGVVVEEELFHQQGTPRASNRSCAIM

SEQ ID NO: 69 - protein, 393 aa, Homo sapiens [sequence omitted]

SEQ ID NO: 70 - protein, 341 aa, Homo sapiens
MEEPQSDPSVEPPLSQETFSDLWKLLPENNVLSPLPSQAMDDLMLSPDDIEQWFTEDPGPDEAPRMPEAAPPVAPAPAAPTPAAPAPAPSWPLSSSVPSQKTYQGSYGFRLGFLHSGTAKSVTCTYSPALNKMFCQLAKTCPVQLWVDSTPPPGTRVRAMAIYKQSQHMTEVVRRCPHHERCSDSDGLAPPQHLIRVEGNLRVEYLDDRNTFRHSVVVPYEPPEVGSDCTTIHYNYMCNSSCMGGMNRRPILTIITLEDSSGNLLGRNSFEVRVCACPGRDRRTEEENLRKKGEPHHELPPGSTKRALPNNTSSSPQPKKKPLDGEYFTLQDQTSFQKENC

SEQ ID NO: 71 - protein, 346 aa, Homo sapiens
MEEPQSDPSVEPPLSQETFSDLWKLLPENNVLSPLPSQAMDDLMLSPDDIEQWFTEDPGPDEAPRMPEAAPPVAPAPAAPTPAAPAPAPSWPLSSSVPSQKTYQGSYGFRLGFLHSGTAKSVTCTYSPALNKMFCQLAKTCPVQLWVDSTPPPGTRVRAMAIYKQSQHMTEVVRRCPHHERCSDSDGLAPPQHLIRVEGNLRVEYLDDRNTFRHSVVVPYEPPEVGSDCTTIHYNYMCNSSCMGGMNRRPILTIITLEDSSGNLLGRNSFEVRVCACPGRDRRTEEENLRKKGEPHHELPPGSTKRALPNNTSSSPQPKKKPLDGEYFTLQMLLDLRWCYFLINSS

SEQ ID NO: 72 - protein, 354 aa, Homo sapiens
MDDLMLSPDDIEQWFTEDPGPDEAPRMPEAAPPVAPAPAAPTPAAPAPAPSWPLSSSVPSQKTYQGSYGFRLGFLHSGTAKSVTCTYSPALNKMFCQLAKTCPVQLWVDSTPPPGTRVRAMAIYKQSQHMTEVVRRCPHHERCSDSDGLAPPQHLIRVEGNLRVEYLDDRNTFRHSVVVPYEPPEVGSDCTTIHYNYMCNSSCMGGMNRRPILTIITLEDSSGNLLGRNSFEVRVCACPGRDRRTEEENLRKKGEPHHELPPGSTKRALPNNTSSSPQPKKKPLDGEYFTLQIRGRERFEMFRELNEALELKDAQAGKEPGGSRAHSSHLKSKKGQSTSRHKKLMFKTEGPDSD

SEQ ID NO: 73 - protein, 302 aa, Homo sapiens
MDDLMLSPDDIEQWFTEDPGPDEAPRMPEAAPPVAPAPAAPTPAAPAPAPSWPLSSSVPSQKTYQGSYGFRLGFLHSGTAKSVTCTYSPALNKMFCQLAKTCPVQLWVDSTPPPGTRVRAMAIYKQSQHMTEVVRRCPHHERCSDSDGLAPPQHLIRVEGNLRVEYLDDRNTFRHSVVVPYEPPEVGSDCTTIHYNYMCNSSCMGGMNRRPILTIITLEDSSGNLLGRNSFEVRVCACPGRDRRTEEENLRKKGEPHHELPPGSTKRALPNNTSSSPQPKKKPLDGEYFTLQDQTSFQKENC

SEQ ID NO: 74 - protein, 307 aa, Homo sapiens
MDDLMLSPDDIEQWFTEDPGPDEAPRMPEAAPPVAPAPAAPTPAAPAPAPSWPLSSSVPSQKTYQGSYGFRLGFLHSGTAKSVTCTYSPALNKMFCQLAKTCPVQLWVDSTPPPGTRVRAMAIYKQSQHMTEVVRRCPHHERCSDSDGLAPPQHLIRVEGNLRVEYLDDRNTFRHSVVVPYEPPEVGSDCTTIHYNYMCNSSCMGGMNRRPILTIITLEDSSGNLLGRNSFEVRVCACPGRDRRTEEENLRKKGEPHHELPPGSTKRALPNNTSSSPQPKKKPLDGEYFTLQMLLDLRWCYFLINSS

SEQ ID NO: 75 - protein, 261 aa, Homo sapiens
MFCQLAKTCPVQLWVDSTPPPGTRVRAMAIYKQSQHMTEVVRRCPHHERCSDSDGLAPPQHLIRVEGNLRVEYLDDRNTFRHSVVVPYEPPEVGSDCTTIHYNYMCNSSCMGGMNRRPILTIITLEDSSGNLLGRNSFEVRVCACPGRDRRTEEENLRKKGEPHHELPPGSTKRALPNNTSSSPQPKKKPLDGEYFTLQIRGRERFEMFRELNEALELKDAQAGKEPGGSRAHSSHLKSKKGQSTSRHKKLMFKTEGPDSD

SEQ ID NO: 76 - protein, 209 aa, Homo sapiens
MFCQLAKTCPVQLWVDSTPPPGTRVRAMAIYKQSQHMTEVVRRCPHHERCSDSDGLAPPQHLIRVEGNLRVEYLDDRNTFRHSVVVPYEPPEVGSDCTTIHYNYMCNSSCMGGMNRRPILTIITLEDSSGNLLGRNSFEVRVCACPGRDRRTEEENLRKKGEPHHELPPGSTKRALPNNTSSSPQPKKKPLDGEYFTLQDQTSFQKENC

SEQ ID NO: 77 - protein, 214 aa, Homo sapiens
MFCQLAKTCPVQLWVDSTPPPGTRVRAMAIYKQSQHMTEVVRRCPHHERCSDSDGLAPPQHLIRVEGNLRVEYLDDRNTFRHSVVVPYEPPEVGSDCTTIHYNYMCNSSCMGGMNRRPILTIITLEDSSGNLLGRNSFEVRVCACPGRDRRTEEENLRKKGEPHHELPPGSTKRALPNNTSSSPQPKKKPLDGEYFTLQMLLDLRWCYFLINSS

SEQ ID NO: 78 - protein, 545 aa, Homo sapiens
MSNNGLDIQDKPPAPPMRNTSTMIGAGSKDAGTLNHGSKPLPPNPEEKKKKDRFYRSILPGDKTNKKKEKERPEISLPSDFEHTIHVGFDAVTGEFTGMPEQWARLLQTSNITKSEQKKNPQAVLDVLEFYNSKKTSNSQKYMSFTDKSAEDYNSSNALNVKAVSETPAVPPVSEDEDDDDDDATPPPVIAPRPEHTKSVYTRSVIEPLPVTPTRDVATSPISPTENNTTPPDALTRNTEKQKKKPKMSDEEILEKLRSIVSVGDPKKKYTRFEKIGQGASGTVYTAMDVATGQEVAIKQMNLQQQPKKELIINEILVMRENKNPNIVNYLDSYLVGDELWVVMEYLAGGSLTDVVTETCMDEGQIAAVCRECLQALEFLHSNQVIHRDIKSDNILLGMDGSVKLTDFGFCAQITPEQSKRSTMVGTPYWMAPEVVTRKAYGPKVDIWSLGIMAIEMIEGEPPYLNENPLRALYLIATNGTPELQNPEKLSAIFRDFLNRCLEMDVEKRGSAKELLQHQFLKIAKPLSSLTPLIAAAKEATKNNH

SEQ ID NO: 79 - protein, 553 aa, Homo sapiens
MSNNGLDIQDKPPAPPMRNTSTMIGAGSKDAGTLNHGSKPLPPNPEEKKKKDRFYRSILPGDKTNKKKEKERPEISLPSDFEHTIHVGFDAVTGEFTGMPEQWARLLQTSNITKSEQKKNPQAVLDVLEFYNSKKTSNSQKYMSFTDKSAEDYNSSNALNVKAVSETPAVPPVSEDEDDDDDDATPPPVIAPRPEHTKSVYTRSVIEPLPVTPTRDVATSPISPTENNTTPPDALTRNTEKQKKKPKMSDEEILEKLRSIVSVGDPKKKYTRFEKIGQGASGTVYTAMDVATGQEVAIKQMNLQQQPKKELIINEILVMRENKNPNIVNYLDSYLVGDELWVVMEYLAGGSLTDVVTETCMDEGQIAAVCRECLQALEFLHSNQVIHRDIKSDNILLGMDGSVKLTDFGFCAQITPEQSKRSTMVGTPYWMAPEVVTRKAYGPKVDIWSLGIMAIEMIEGEPPYLNENPLRALYLIATNGTPELQNPEKLSAIFRDFLNRCLEMDVEKRGSAKELLQVRKLRFQVFSNFSMIAASIPEDCQAPLQPHSTDCCS

SEQ ID NO: 80 - protein, 416 aa, Homo sapiens
MDEADRRLLRRCRLRLVEELQVDQLWDALLSRELFRPHMIEDIQRAGSGSRRDQARQLIIDLETRGSQALPLFISCLEDTGQDMLASFLRTNRQAAKLSKPTLENLTPVVLRPEIRKPEVLRPETPRPVDIGSGGFGDVGALESLRGNADLAYILSMEPCGHCLIINNVNFCRESGLRTRTGSNIDCEKLRRRFSSLHFMVEVKGDLTAKKMVLALLELAQQDHGALDCCVVVILSHGCQASHLQFPGAVYGTDGCPVSVEKIVNIFNGTSCPSLGGKPKLFFIQACGGEQKDHGFEVASTSPEDESPGSNPEPDATPFQEGLRTFDQLDAISSLPTPSDIFVSYSTFPGFVSWRDPKSGSWYVETLDDIFEQWAHSEDLQSLLLRVANAVSVKGIYKQMPGCFNFLRKKLFFKTS

SEQ ID NO: 81 - protein, 266 aa, Homo sapiens
MDEADRRLLRRCRLRLVEELQVDQLWDALLSRELFRPHMIEDIQRAGSGSRRDQARQLIIDLETRGSQALPLFISCLEDTGQDMLASFLRTNRQAAKLSKPTLENLTPVVLRPEIRKPEVLRPETPRPVDIGSGGFGDVEQKDHGFEVASTSPEDESPGSNPEPDATPFQEGLRTFDQLDAISSLPTPSDIFVSYSTFPGFVSWRDPKSGSWYVETLDDIFEQWAHSEDLQSLLLRVANAVSVKGIYKQMPGCFNFLRKKLFFKTS

SEQ ID NO: 82 - protein, 154 aa, Homo sapiens
MDEADRRLLRRCRLRLVEELQVDQLWDALLSRELFRPHMIEDIQRAGSGSRRDQARQLIIDLETRGSQALPLFISCLEDTGQDMLASFLRTNRQAAKLSKPTLENLTPVVLRPEIRKPEVLRPETPRPVDIGSGGFGDVGALESLRGNADLTVL

SEQ ID NO: 83 - protein, 333 aa, Homo sapiens
MLASFLRTNRQAAKLSKPTLENLTPVVLRPEIRKPEVLRPETPRPVDIGSGGFGDVGALESLRGNADLAYILSMEPCGHCLIINNVNFCRESGLRTRTGSNIDCEKLRRRFSSLHFMVEVKGDLTAKKMVLALLELAQQDHGALDCCVVVILSHGCQASHLQFPGAVYGTDGCPVSVEKIVNIFNGTSCPSLGGKPKLFFIQACGGEQKDHGFEVASTSPEDESPGSNPEPDATPFQEGLRTFDQLDAISSLPTPSDIFVSYSTFPGFVSWRDPKSGSWYVETLDDIFEQWAHSEDLQSLLLRVANAVSVKGIYKQMPGCFNFLRKKLFFKTS

SEQ ID NO: 84 - protein, 683 aa, Homo sapiens
MALFVRLLALALALALGPAATLAGPAKSPYQLVLQHSRLRGRQHGPNVCAVQKVIGTNRKYFTNCKQWYQRKICGKSTVISYECCPGYEKVPGEKGCPAALPLSNLYETLGVVGSTTTQLYTDRTEKLRPEMEGPGSFTIFAPSNEAWASLPAEVLDSLVSNVNIELLNALRYHMVGRRVLTDELKHGMTLTSMYQNSNIQIHHYPNGIVTVNCARLLKADHHATNGVVHLIDKVISTITNNIQQIIEIEDTFETLRAAVAASGLNTMLEGNGQYTLLAPTNEAFEKIPSETLNRILGDPEALRDLLNNHILKSAMCAEAIVAGLSVETLEGTTLEVGCSGDMLTINGKAIISNKDILATNGVIHYIDELLIPDSAKTLFELAAESDVSTAIDLFRQAGLGNHLSGSERLTLLAPLNSVFKDGTPPIDAHTRNLLRNHIIKDQLASKYLYHGQTLETLGGKKLRVFVYRNSLCIENSCIAAHDKRGRYGTLFTMDRVLTPPMGTVMDVLKGDNRFSMLVAAIQSAGLTETLNREGVYTVFAPTNEAFRALPPRERSRLLGDAKELANILKYHIGDEILVSGGIGALVRLKSLQGDKLEVSLKNNVVSVNKEPVAEPDIMATNGVVHVITNVLQPPANRPQERGDELADSALEIFKQASAFSRASQRSVRLAPVYQKLLERMKH

SEQ ID NO: 85 - protein, 323 aa, Homo sapiens
MWPLVAALLLGSACCGSAQLLFNKTKSVEFTFCNDTVVIPCFVTNMEAQNTTEVYVKWKFKGRDIYTFDGALNKSTVPTDFSSAKIEVSQLLKGDASLKMDKSDAVSHTGNYTCEVTELTREGETIIELKYRVVSWFSPNENILIVIFPIFAILLFWGQFGIKTLKYRSGGMDEKTIALLVAGLVITVIVIVGAILFVPGEYSLKNATGLGLIVTSTGILILLHYYVFSTAIGLTSFVIAILVIQVIAYILAVVGLSLCIAACIPMHGPLLISGLSILALAQLLGLVYMKFVASNQKTIQPPRKAVEEPLNAFKESKGMMNDE

SEQ ID NO: 86 - protein, 292 aa, Homo sapiens
MWPLVAALLLGSACCGSAQLLFNKTKSVEFTFCNDTVVIPCFVTNMEAQNTTEVYVKWKFKGRDIYTFDGALNKSTVPTDFSSAKIEVSQLLKGDASLKMDKSDAVSHTGNYTCEVTELTREGETIIELKYRVVSWFSPNENILIVIFPIFAILLFWGQFGIKTLKYRSGGMDEKTIALLVAGLVITVIVIVGAILFVPGEYSLKNATGLGLIVTSTGILILLHYYVFSTAIGLTSFVIAILVIQVIAYILAVVGLSLCIAACIPMHGPLLISGLSILALAQLLGLVYMKFV

SEQ ID NO: 87 - protein, 305 aa, Homo sapiens
MWPLVAALLLGSACCGSAQLLFNKTKSVEFTFCNDTVVIPCFVTNMEAQNTTEVYVKWKFKGRDIYTFDGALNKSTVPTDFSSAKIEVSQLLKGDASLKMDKSDAVSHTGNYTCEVTELTREGETIIELKYRVVSWFSPNENILIVIFPIFAILLFWGQFGIKTLKYRSGGMDEKTIALLVAGLVITVIVIVGAILFVPGEYSLKNATGLGLIVTSTGILILLHYYVFSTAIGLTSFVIAILVIQVIAYILAVVGLSLCIAACIPMHGPLLISGLSILALAQLLGLVYMKFVASNQKTIQPPRNN

SEQ ID NO: 88 - protein, 311 aa, Homo sapiens
MWPLVAALLLGSACCGSAQLLFNKTKSVEFTFCNDTVVIPCFVTNMEAQNTTEVYVKWKFKGRDIYTFDGALNKSTVPTDFSSAKIEVSQLLKGDASLKMDKSDAVSHTGNYTCEVTELTREGETIIELKYRVVSWFSPNENILIVIFPIFAILLFWGQFGIKTLKYRSGGMDEKTIALLVAGLVITVIVIVGAILFVPGEYSLKNATGLGLIVTSTGILILLHYYVFSTAIGLTSFVIAILVIQVIAYILAVVGLSLCIAACIPMHGPLLISGLSILALAQLLGLVYMKFVASNQKTIQPPRKAVEEPLN

SEQ ID NO: 89 - protein, 235 aa, Homo sapiens
MALPVTALLLPLALLLHAARPSQFRVSPLDRTWNLGETVELKCQVLLSNPTSGCSWLFQPRGAAASPTFLLYLSQNKPKAAEGLDTQRFSGKRLGDTFVLTLSDFRRENEGYYFCSALSNSIMYFSHFVPVFLPAKPTTTPAPRPPTPAPTIASQPLSLRPEACRPAAGGAVHTRGLDFACDIYIWAPLAGTCGVLLLSLVITLYCNHRNRRRVCKCPRPVVKSGDKPSLSARYV

SEQ ID NO: 90 - protein, 198 aa, Homo sapiens
MALPVTALLLPLALLLHAARPSQFRVSPLDRTWNLGETVELKCQVLLSNPTSGCSWLFQPRGAAASPTFLLYLSQNKPKAAEGLDTQRFSGKRLGDTFVLTLSDFRRENEGYYFCSALSNSIMYFSHFVPVFLPAKPTTTPAPRPPTPAPTIASQPLSLRPEACRPAAGGAGNRRRVCKCPRPVVKSGDKPSLSARYV

SEQ ID NO: 91 - protein, 276 aa, Homo sapiens
MRNQAPGRPKGATFPPRRPTGSRAPPLAPELRAKQRPGERVMALPVTALLLPLALLLHAARPSQFRVSPLDRTWNLGETVELKCQVLLSNPTSGCSWLFQPRGAAASPTFLLYLSQNKPKAAEGLDTQRFSGKRLGDTFVLTLSDFRRENEGYYFCSALSNSIMYFSHFVPVFLPAKPTTTPAPRPPTPAPTIASQPLSLRPEACRPAAGGAVHTRGLDFACDIYIWAPLAGTCGVLLLSLVITLYCNHRNRRRVCKCPRPVVKSGDKPSLSARYV

SEQ ID NO: 92 - protein, 350 aa, Homo sapiens
MQRLGATLLCLLLAAAVPTAPAPAPTATSAPVKPGPALSYPQEEATLNEMFREVEELMEDTQHKLRSAVEEMEAEEAAAKASSEVNLANLPPSYHNETNTDTKVGNNTIHVHREIHKITNNQTGQMVFSETVITSVGDEEGRRSHECIIDEDCGPSMYCQFASFQYTCQPCRGQRMLCTRDSECCGDQLCVWGHCTKMATRGSNGTICDNQRDCQPGLCCAFQRGLLFPVCTPLPVEGELCHDPASRLLDLITWELEPDGALDRCPCASGLLCQPHSHSLVYVCKPTFVGSRDQDGEILLPREVPDEYEVGSFMEEVRQELEDLERSLTEEMALREPAAAAAALLGGEEI

SEQ ID NO: 93 - protein, 678 aa, Homo sapiens
MAPSLSPGPAALRRAPQLLLLLLAAECALAALLPAREATQFLRPRQRRAFQVFEEAKQGHLERECVEELCSREEAREVFENDPETDYFYPRYLDCINKYGSPYTKNSGFATCVQNLPDQCTPNPCDRKGTQACQDLMGNFFCLCKAGWGGRLCDKDVNECSQENGGCLQICHNKPGSFHCSCHSGFELSSDGRTCQDIDECADSEACGEARCKNLPGSYSCLCDEGFAYSSQEKACRDVDECLQGRCEQVCVNSPGSYTCHCDGRGGLKLSQDMDTCEDILPCVPFSVAKSVKSLYLGRMFSGTPVIRLRFKRLQPTRLVAEFDFRTFDPEGILLFAGGHQDSTWIVLALRAGRLELQLRYNGVGRVTSSGPVINHGMWQTISVEELARNLVIKVNRDAVMKIAVAGDLFQPERGLYHLNLTVGGIPFHEKDLVQPINPRLDGCMRSWNWLNGEDTTIQETVKVNTRMQCFSVTERGSFYPGSGFAFYSLDYMRTPLDVGTESTWEVEVVAHIRPAADTGVLFALWAPDLRAVPLSVALVDYHSTKKLKKQLVVLAVEHTALALMEIKVCDGQEHVVTVSLRDGEATLEVDGTRGQSEVSAAQLQERLAVLERHLRSPVLTFAGGLPDVPVTSAPVTAFYRGCMTLEVNRRLLDLDEAAYKHSDITAHSCPPVEPAAA

SEQ ID NO: 94 - protein, 721 aa, Homo sapiens
MAPSLSPGPAALRRAPQLLLLLLAAECALAALLPAREATQFLRPRQRRAFQVFEEAKQGHLERECVEELCSREEAREVFENDPETDYFYPRYLDCINKYGSPYTKNSGFATCVQNLPDQCTPNPCDRKGTQACQDLMGNFFCLCKAGWGGRLCDKDVNECSQENGGCLQICHNKPGSFHCSCHSGFELSSDGRTCQDIDECADSEACGEARCKNLPGSYSCLCDEGFAYSSQEKACRDVDECLQGRCEQVCVNSPGSYTCHCDGRGGLKLSQDMDTCELEAGWPCPRHRRDGSPAARPGRGAQGSRSEGHIPDRRGPRPWQDILPCVPFSVAKSVKSLYLGRMFSGTPVIRLRFKRLQPTRLVAEFDFRTFDPEGILLFAGGHQDSTWIVLALRAGRLELQLRYNGVGRVTSSGPVINHGMWQTISVEELARNLVIKVNRDAVMKIAVAGDLFQPERGLYHLNLTVGGIPFHEKDLVQPINPRLDGCMRSWNWLNGEDTTIQETVKVNTRMQCFSVTERGSFYPGSGFAFYSLDYMRTPLDVGTESTWEVEVVAHIRPAADTGVLFALWAPDLRAVPLSVALVDYHSTKKLKKQLVVLAVEHTALALMEIKVCDGQEHVVTVSLRDGEATLEVDGTRGQSEVSAAQLQERLAVLERHLRSPVLTFAGGLPDVPVTSAPVTAFYRGCMTLEVNRRLLDLDEAAYKHSDITAHSCPPVEPAAA

SEQ ID NO: 95 - protein, 624 aa, Homo sapiens
MCMCQASPPPAALAGCLLSSCVQPAREHGGAFSKAEWLSNCINKYGSPYTKNSGFATCVQNLPDQCTPNPCDRKGTQACQDLMGNFFCLCKAGWGGRLCDKDVNECSQENGGCLQICHNKPGSFHCSCHSGFELSSDGRTCQDIDECADSEACGEARCKNLPGSYSCLCDEGFAYSSQEKACRDVDECLQGRCEQVCVNSPGSYTCHCDGRGGLKLSQDMDTCEDILPCVPFSVAKSVKSLYLGRMFSGTPVIRLRFKRLQPTRLVAEFDFRTFDPEGILLFAGGHQDSTWIVLALRAGRLELQLRYNGVGRVTSSGPVINHGMWQTISVEELARNLVIKVNRDAVMKIAVAGDLFQPERGLYHLNLTVGGIPFHEKDLVQPINPRLDGCMRSWNWLNGEDTTIQETVKVNTRMQCFSVTERGSFYPGSGFAFYSLDYMRTPLDVGTESTWEVEVVAHIRPAADTGVLFALWAPDLRAVPLSVALVDYHSTKKLKKQLVVLAVEHTALALMEIKVCDGQEHVVTVSLRDGEATLEVDGTRGQSEVSAAQLQERLAVLERHLRSPVLTFAGGLPDVPVTSAPVTAFYRGCMTLEVNRRLLDLDEAAYKHSDITAHSCPPVEPAAA

SEQ ID NO: 96 - protein, 405 aa, Homo sapiens
MDTCEDILPCVPFSVAKSVKSLYLGRMFSGTPVIRLRFKRLQPTRLVAEFDFRTFDPEGILLFAGGHQDSTWIVLALRAGRLELQLRYNGVGRVTSSGPVINHGMWQTISVEELARNLVIKVNRDAVMKIAVAGDLFQPERGLYHLNLTVGGIPFHEKDLVQPINPRLDGCMRSWNWLNGEDTTIQETVKVNTRMQCFSVTERGSFYPGSGFAFYSLDYMRTPLDVGTESTWEVEVVAHIRPAADTGVLFALWAPDLRAVPLSVALVDYHSTKKLKKQLVVLAVEHTALALMEIKVCDGQEHVVTVSLRDGEATLEVDGTRGQSEVSAAQLQERLAVLERHLRSPVLTFAGGLPDVPVTSAPVTAFYRGCMTLEVNRRLLDLDEAAYKHSDITAHSCPPVEPAAA

SEQ ID NO: 97 - protein, 379 aa, Homo sapiens
MFSGTPVIRLRFKRLQPTRLVAEFDFRTFDPEGILLFAGGHQDSTWIVLALRAGRLELQLRYNGVGRVTSSGPVINHGMWQTISVEELARNLVIKVNRDAVMKIAVAGDLFQPERGLYHLNLTVGGIPFHEKDLVQPINPRLDGCMRSWNWLNGEDTTIQETVKVNTRMQCFSVTERGSFYPGSGFAFYSLDYMRTPLDVGTESTWEVEVVAHIRPAADTGVLFALWAPDLRAVPLSVALVDYHSTKKLKKQLVVLAVEHTALALMEIKVCDGQEHVVTVSLRDGEATLEVDGTRGQSEVSAAQLQERLAVLERHLRSPVLTFAGGLPDVPVTSAPVTAFYRGCMTLEVNRRLLDLDEAAYKHSDITAHSCPPVEPAAA

SEQ ID NO: 98 - protein, 162 aa, Homo sapiens
MRISKPHLRSISIQCYLCLLLNSHFLTEAGIHVFILGCFSAGLPKTEANWVNVISDLKKIEDLIQSMHIDATLYTESDVHPSCKVTAMKCFLLELQVISLESGDASIHDTVENLIILANNSLSSNGNVTESGCKECEELEEKNIKEFLQSFVHIVQMFINTS

SEQ ID NO: 99 - protein, 135 aa, Homo sapiens
MVLGTIDLCSCFSAGLPKTEANWVNVISDLKKIEDLIQSMHIDATLYTESDVHPSCKVTAMKCFLLELQVISLESGDASIHDTVENLIILANNSLSSNGNVTESGCKECEELEEKNIKEFLQSFVHIVQMFINTS

SEQ ID NO: 100 - protein, 897 aa, Homo sapiens
MVLAQGLLSMALLALCWERSLAGAEETIPLQTLRCYNDYTSHITCRWADTQDAQRLVNVTLIRRVNEDLLEPVSCDLSDDMPWSACPHPRCVPRRCVIPCQSFVVTDVDYFSFQPDRPLGTRLTVTLTQHVQPPEPRDLQISTDQDHFLLTWSVALGSPQSHWLSPGDLEFEVVYKRLQDSWEDAAILLSNTSQATLGPEHLMPSSTYVARVRTRLAPGSRLSGRPSKWSPEVCWDSQPGDEAQPQNLECFFDGAAVLSCSWEVRKEVASSVSFGLFYKPSPDAGEEECSPVLREGLGSLHTRHHCQIPVPDPATHGQYIVSVQPRRAEKHIKSSVNIQMAPPSLNVTKDGDSYSLRWETMKMRYEHIDHTFEIQYRKDTATWKDSKTETLQNAHSMALPALEPSTRYWARVRVRTSRTGYNGIWSEWSEARSWDTESVLPMWVLALIVIFLTIAVLLALRFCGIYGYRLRRKWEEKIPNPSKSHLFQNGSAELWPPGSMSAFTSGSPPHQGPWGSRFPELEGVFPVGFGDSEVSPLTIEDPKHVCDPPSGPDTTPAASDLPTEQPPSPQPGPPAASHTPEKQASSFDFNGPYLGPPHSRSLPDILGQPEPPQEGGSQKSPPPGSLEYLCLPAGGQVQLVPLAQAMGPGQAVEVERRPSQGAAGSPSLESGGGPAPPALGPRVGGQDQKDSPVAIPMSSGDTEDPGVASGYVSSADLVFTPNSGASSVSLVPSLGLPSDQTPSLCPGLASGPPGAPGPVKSGFEGYVELPPIEGRSPRSPRNNPVPPEAKSPVLNPGERPADVSPTSPQPEGLLVLQQVGDYCFLPGLGPGPLSLRSKPSSPGPGPEIKNLDQAFQVKKPPGQAVPQVPVIQLFKALKQQDYLSLPPWEVNKPGEVC

SEQ ID NO: 101 - protein, 903 aa, Homo sapiens
MVLAQGLLSMALLALCWERSLAGAEETIPLQTLRCYNDYTSHITCRWADTQDAQRLVNVTLIRRVNEDLLEPVSCDLSDDMPWSACPHPRCVPRRCVIPCQSFVVTDVDYFSFQPDRPLGTRLTVTLTQHVQPPEPRDLQISTDQDHFLLTWSVALGSPQSHWLSPGDLEFEVVYKRLQDSWEDAAILLSNTSQATLGPEHLMPSSTYVARVRTRLAPGSRLSGRPSKWSPEVCWDSQPGDEAQPQNLECFFDGAAVLSCSWEVRKEVASSVSFGLFYKPSPDAGSAVLLREEECSPVLREGLGSLHTRHHCQIPVPDPATHGQYIVSVQPRRAEKHIKSSVNIQMAPPSLNVTKDGDSYSLRWETMKMRYEHIDHTFEIQYRKDTATWKDSKTETLQNAHSMALPALEPSTRYWARVRVRTSRTGYNGIWSEWSEARSWDTESVLPMWVLALIVIFLTIAVLLALRFCGIYGYRLRRKWEEKIPNPSKSHLFQNGSAELWPPGSMSAFTSGSPPHQGPWGSRFPELEGVFPVGFGDSEVSPLTIEDPKHVCDPPSGPDTTPAASDLPTEQPPSPQPGPPAASHTPEKQASSFDFNGPYLGPPHSRSLPDILGQPEPPQEGGSQKSPPPGSLEYLCLPAGGQVQLVPLAQAMGPGQAVEVERRPSQGAAGSPSLESGGGPAPPALGPRVGGQDQKDSPVAIPMSSGDTEDPGVASGYVSSADLVFTPNSGASSVSLVPSLGLPSDQTPSLCPGLASGPPGAPGPVKSGFEGYVELPPIEGRSPRSPRNNPVPPEAKSPVLNPGERPADVSPTSPQPEGLLVLQQVGDYCFLPGLGPGPLSLRSKPSSPGPGPEIKNLDQAFQVKKPPGQAVPQVPVIQLFKALKQQDYLSLPPWEVNKPGEVC

SEQ ID NO: 102 - protein, 483 aa, Homo sapiens
MSIRVTQKSYKVSTSGPRAFSSRSYTSGPGSRISSSSFSRVGSSNFRGGLGGGYGGASGMGGITAVTVNQSLLSPLVLEVDPNIQAVRTQEKEQIKTLNNKFASFIDKVRFLEQQNKMLETKWSLLQQQKTARSNMDNMFESYINNLRRQLETLGQEKLKLEAELGNMQGLVEDFKNKYEDEINKRTEMENEFVLIKKDVDEAYMNKVELESRLEGLTDEINFLRQLYEEEIRELQSQISDTSVVLSMDNSRSLDMDSIIAEVKAQYEDIANRSRAEAESMYQIKYEELQSLAGKHGDDLRRTKTEISEMNRNISRLQAEIEGLKGQRASLEAAIADAEQRGELAIKDANAKLSELEAALQRAKQDMARQLREYQELMNVKLALDIEIATYRKLLEGEESRLESGMQNMSIHTKTTSGYAGGLSSAYGGLTSPGLSYSLGSSFGSGAGSSSFSRTSSSRAVVVKKIETRDGKLVSESSDVLPK

SEQ ID NO: 103 - protein, 511 aa, Homo sapiens
MNGVSWSQDLQEGISAWFGPPASTPASTMSIRVTQKSYKVSTSGPRAFSSRSYTSGPGSRISSSSFSRVGSSNFRGGLGGGYGGASGMGGITAVTVNQSLLSPLVLEVDPNIQAVRTQEKEQIKTLNNKFASFIDKVRFLEQQNKMLETKWSLLQQQKTARSNMDNMFESYINNLRRQLETLGQEKLKLEAELGNMQGLVEDFKNKYEDEINKRTEMENEFVLIKKDVDEAYMNKVELESRLEGLTDEINFLRQLYEEEIRELQSQISDTSVVLSMDNSRSLDMDSIIAEVKAQYEDIANRSRAEAESMYQIKYEELQSLAGKHGDDLRRTKTEISEMNRNISRLQAEIEGLKGQRASLEAAIADAEQRGELAIKDANAKLSELEAALQRAKQDMARQLREYQELMNVKLALDIEIATYRKLLEGEESRLESGMQNMSIHTKTTSGYAGGLSSAYGGLTSPGLSYSLGSSFGSGAGSSSFSRTSSSRAVVVKKIETRDGKLVSESSDVLPK

SEQ ID NO: 104 - protein, 400 aa, Homo sapiens
MATLLLLLGVLVVSPDALGSTTAVQTPTSGEPLVSTSEPLSSKMYTTSITSDPKADSTGDQTSALPPSTSINEGSPLWTSIGASTGSPLPEPTTYQEVSIKMSSVPQETPHATSHPAVPITANSLGSHTVTGGTITTNSPETSSRTSGAPVTTAASSLETSRGTSGPPLTMATVSLETSKGTSGPPVTMATDSLETSTGTTGPPVTMTTGSLEPSSGASGPQVSSVKLSTMMSPTTSTNASTVPFRNPDENSRGMLPVAVLVALLAVIVLVALLLLWRRRQKRRTGALVLSRGGKRNGVVDAWAGPAQVPEEGAVTVTVGGSGGDKGSGFPDGEGSSRRPTLTTFFGRRKSRQGSLAMEELKSGSGPSLKGEEEPLVASEDGAVDAPAPDEPEGGDGAAP

SEQ ID NO: 105 - protein, 752 aa, Homo sapiens
MSSRTVLAPGNDRNSDTHGTLGSGRSSDKGPSWSSRSLGARCRNSIASCPEEQPHVGNYRLLRTIGKGNFAKVKLARHILTGREVAIKIIDKTQLNPSSLQKLFREVRIMKGLNHPNIVKLFEVIETEKTLYLVMEYASAGEVFDYLVSHGRMKEKEARAKFRQIVSAVHYCHQKNIVHRDLKAENLLLDAEANIKIADFGFSNEFTLGSKLDTFCGSPPYAAPELFQGKKYDGPEVDIWSLGVILYTLVSGSLPFDGHNLKELRERVLRGKYRVPFYMSTDCESILRRFLVLNPAKRCTLEQIMKDKWINIGYEGEELKPYTEPEEDFGDTKRIEVMVGMGYTREEIKESLTSQKYNEVTATYLLLGRKTEEGGDRGAPGLALARVRAPSDTTNGTSSSKGTSHSKGQRSSSSTYHRQRRHSDFCGPSPAPLHPKRSPTSTGEAELKEERLPGRKASCSTAGSGSRGLPPSSPMVSSAHNPNKAEIPERRKDSTSTPNNLPPSMMTRRNTYVCTERPGAERPSLLPNGKENSSGTPRVPPASPSSHSLAPPSGERSRLARGSTIRSTFHGGQVRDRRAGGGGGGGVQNGPPASPTLAHEAAPLPAGRPRPTTNLFTKLTSKLTRRVADEPERIGGPEVTSCHLPWDQTETAPRLLRFPWSVKLTSSRPPEALMAALRQATAAARCRCRQPQPFLLACLHGGAGGPEPLSHFEVEVCQLPRPGLRGVLFRRVAGTALAFRTLVTRISNDLEL

SEQ ID NO: 106 - protein, 688 aa, Homo sapiens
MSSRTVLAPGNDRNSDTHGTLGSGRSSDKGPSWSSRSLGARCRNSIASCPEEQPHVGNYRLLRTIGKGNFAKVKLARHILTGREVAIKIIDKTQLNPSSLQKLFREVRIMKGLNHPNIVKLFEVIETEKTLYLVMEYASAGEVFDYLVSHGRMKEKEARAKFRQIVSAVHYCHQKNIVHRDLKAENLLLDAEANIKIADFGFSNEFTLGSKLDTFCGSPPYAAPELFQGKKYDGPEVDIWSLGVILYTLVSGSLPFDGHNLKELRERVLRGKYRVPFYMSTDCESILRRFLVLNPAKRCTLEQIMKDKWINIGYEGEELKPYTEPEEDFGDTKRIEVMVGMGYTREEIKESLTSQKYNEVTATYLLLGRKTEEGGDRGAPGLALARVRAPSDTTNGTSSSKGTSHSKGQRSSSSTYHRQRRHSDFCGPSPAPLHPKRSPTSTGEAELKEERLPGRKASCSTAGSGSRGLPPSSPMVSSAHNPNKAEIPERRKDSTSTPNNLPPSMMTRRNTYVCTERPGAERPSLLPNGKENSSGTPRVPPASPSSHSLAPPSGERSRLARGSTIRSTFHGGQVRDRRAGGGGGGGVQNGPPASPTLAHEAAPLPAGRPRPTTNLFTKLTSKLTRRVTLDPSKRQNSNRCVSGASLPQGSKIRSQTNLRESGDLRSQVAIYLGIKRKPPPGCSDSPGV

SEQ ID NO: 107 - protein, 600 aa, Homo sapiens
MGKKLDLSKLTDEEAQHVLEVVQRDFDLRRKEEERLEALKGKIKKESSKRELLSDTAHLNETHCARCLQPYQLLVNSKRQCLECGLFTCKSCGRVHPEEQGWICDPCHLARVVKIGSLEWYYEHVKARFKRFGSAKVIRSLHGRLQGGAGPELISEERSGDSDQTDEDGEPGSEAQAQAQPFGSKKKRLLSVHDFDFEGDSDDSTQPQGHSLHLSSVPEARDSPQSLTDESCSEKAAPHKAEGLEEADTGASGCHSHPEEQPTSISPSRHGALAELCPPGGSHRMALGTAAALGSNVIRNEQLPLQYLADVDTSDEESIRAHVMASHHSKRRGRASSESQIFELNKHISAVECLLTYLENTVVPPLAKGLGAGVRTEADVEEEALRRKLEELTSNVSDQETSSEEEEAKDEKAEPNRDKSVGPLPQADPEVGTAAHQTNRQEKSPQDPGDPVQYNRTTDEELSELEDRVAVTASEVQQAESEVSDIESRIAALRAAGLTVKPSGKPRRKSNLPIFLPRVAGKLGKRPEDPNADPSSEAKAMAVPYLLRRKFSNSLKSQGKDDDSFDRKSVYRGSLTQRNPNARKGMASHTFAKPVVAHQS

SEQ ID NO: 108 - protein, 572 aa, Homo sapiens
MGKKLDLSKLTDEEAQHVLEVVQRDFDLRRKEEERLEALKGKIKKESSKRELLSDTAHLNETHCARCLQPYQLLVNSKRQCLECGLFTCKSCGRVHPEEQGWICDPCHLARVVKIGSLEWYYEHVKARFKRFGSAKVIRSLHGRLQGGAGPELISEERSGDSDQTDEDGEPGSEAQAQAQPFGSKKKRLLSVHDFDFEGDSDDSTQPQGHSLHLSSVPEARDSPQSLTDESCSEKAAPHKAEGLEEADTGASGCHSHPEEQPTSISPSRHGALAELCPPGGSHRMALGTAAALGSNVIRNEQLPLQYLADVDTSDEESIRAHVMASHHSKRRGRASSESQGLGAGVRTEADVEEEALRRKLEELTSNVSDQETSSEEEEAKDEKAEPNRDKSVGPLPQADPEVGTAAHQTNRQEKSPQDPGDPVQYNRTTDEELSELEDRVAVTASEVQQAESEVSDIESRIAALRAAGLTVKPSGKPRRKSNLPIFLPRVAGKLGKRPEDPNADPSSEAKAMAVPYLLRRKFSNSLKSQGKDDDSFDRKSVYRGSLTQRNPNARKGMASHTFAKPVVAHQS

SEQ ID NO: 109 - protein, 480 aa, Homo sapiens
MGKKLDLSKLTDEEAQHVLEVVQRDFDLRRKEEERLEALKGKIKKESSKRELLSDTAHLNETHCARCLQPYQLLVNSKRQCLECGLFTCKSCGRVHPEEQGWICDPCHLARVVKIGSLEWYYEHVKARFKRFGSAKVIRSLHGRLQGGAGPELISEERSGDSDQTDEDGEPGSEAQAQAQPFGSKSLTDESCSEKAAPHKAEGLEEADTGASGCHSHPEEQPTSISPSRHGALAELCPPGGSHRMALGTAAALGSNVIRNEQLPLQYLADVDTSDEESIRAHVMASHHSKRRGRASSESQGLGAGVRTEADVEEEALRRKLEELTSNVSDQETSSEEEEAKDEKAEPNRDKSVGPLPQADPEVSDIESRIAALRAAGLTVKPSGKPRRKSNLPIFLPRVAGKLGKRPEDPNADPSSEAKAMAVPYLLRRKFSNSLKSQGKDDDSFDRKSVYRGSLTQRNPNARKGMASHTFAKPVVAHQS

SEQ ID NO: 110 - protein, 551 aa, Homo sapiens
MGKKLDLSKLTDEEAQHVLEVVQRDFDLRRKEEERLEALKGKIKKESSKRELLSDTAHLNETHCARCLQPYQLLVNSKRQCLECGLFTCKSCGRVHPEEQGWICDPCHLARVVKIGSLEWYYEHVKARFKRFGSAKVIRSLHGRLQGGAGPELISEERSGDSDQTDEDGEPGSEAQAQAQPFGSKKKRLLSVHDFDFEGDSDDSTQPQGHSLHLSSVPEARDSPQSLTDESCSEKAAPHKAEGLEEADTGASGCHSHPEEQPTSISPSRHGALAELCPPGGSHRMALGTAAALGSNVIRNEQLPLQYLADVDTSDEESIRAHVMASHHSKRRGRASSESQIFELNKHISAVECLLTYLENTVVPPLAKGLGAGVRTEADVEEEALRRKLEELTSNVSDQETSSEEEEAKDEKAEPNRDKSVGPLPQADPEVGTAAHQTNRQEKSPQDPGDPVQYNRTTDEELSELEDRVAVTASEVQQAESEVSDIESRIAALRAAGLTVKPSGKPRRKSNLPALYEGTLSLCSEDLKHTHPDSVKSKRSRLNHVASCGNP

SEQ ID NO: 111 - protein, 457 aa, Homo sapiens
MGKKLDLSKLTDEEAQHVLEVVQRDFDLRRKEEERLEALKGKIKKESSKRELLSDTAHLNETHCARCLQPYQLLVNSKRQCLECGLFTCKSCGRVHPEEQGWICDPCHLARVVKIGSLEWYYEHVKARFKRFGSAKVIRSLHGRLQGGAGPELISEERSGDSDQTDEDGEPGSEAQAQAQPFGSKKKRLLSVHDFDFEGDSDDSTQPQGHSLHLSSVPEARDSPQGLGAGVRTEADVEEEALRRKLEELTSNVSDQETSSEEEEAKDEKAEPNRDKSVGPLPQADPEVGTAAHQTNRQEKSPQDPGDPVQYNRTTDEELSELEDRVAVTASEVQQAESEVSDIESRIAALRAAGLTVKPSGKPRRKSNLPIFLPRVAGKLGKRPEDPNADPSSEAKAMAVPYLLRRKFSNSLKSQGKDDDSFDRKSVYRGSLTQRNPNARKGMASHTFAKPVVAHQS

SEQ ID NO: 112 - protein, 469 aa, Homo sapiens
MHSFPPLLLLLFWGVVSHSFPATLETQEQDVDLVQKYLEKYYNLKNDGRQVEKRRNSGPVVEKLKQMQEFFGLKVTGKPDAETLKVMKQPRCGVPDVAQFVLTEGNPRWEQTHLTYRIENYTPDLPRADVDHAIEKAFQLWSNVTPLTFTKVSEGQADIMISFVRGDHRDNSPFDGPGGNLAHAFQPGPGIGGDAHFDEDERWTNNFREYNLHRVAAHELGHSLGLSHSTDIGALMYPSYTFSGDVQLAQDDIDGIQAIYGRSQNPVQPIGPQTPKACDSKLTFDAITTIRGEVMFFKDRFYMRTNPFYPEVELNFISVFWPQLPNGLEAAYEFADRDEVRFFKGNKYWAVQGQNVLHGYPKDIYSSFGFPRTVKHIDAALSEENTGKTYFFVANKYWRYDEYKRSMDPGYPKMIAHDFPGIGHKVDAVFMKDGFFYFFHGTRQYKFDPKTKRILTLQKANSWFNCRKN

SEQ ID NO: 113 - protein, 267 aa, Homo sapiens
MRLTVLCAVCLLPGSLALPLPQEAGGMSELQWEQAQDYLKRFYLYDSETKNANSLEAKLKEMQKFFGLPITGMLNSRVIEIMQKPRCGVPDVAEYSLFPNSPKWTSKVVTYRIVSYTRDLPHITVDRLVSKALNMWGKEIPLHFRKVVWGTADIMIGFARGAHGDSYPFDGPGNTLAHAFAPGTGLGGDAHFDEDERWTDGSSLGINFLYAATHELGHSLGMGHSSDPNAVMYPTYGNGDPQNFKLSQDDIKGIQKLYGKRSNSRKK

SEQ ID NO: 114 - protein, 599 aa, Homo sapiens
MSRSLLLWFLLFLLLLPPLPVLLADPGAPTPVNPCCYYPCQHQGICVRFGLDRYQCDCTRTGYSGPNCTIPGLWTWLRNSLRPSPSFTHFLLTHGRWFWEFVNATFIREMLMRLVLTVRSNLIPSPPTYNSAHDYISWESFSNVSYYTRILPSVPKDCPTPMGTKGKKQLPDAQLLARRFLLRRKFIPDPQGTNLMFAFFAQHFTHQFFKTSGKMGPGFTKALGHGVDLGHIYGDNLERQYQLRLFKDGKLKYQVLDGEMYPPSVEEAPVLMHYPRGIPPQSQMAVGQEVFGLLPGLMLYATLWLREHNRVCDLLKAEHPTWGDEQLFQTTRLILIGETIKIVIEEYVQQLSGYFLQLKFDPELLFGVQFQYRNRIAMEFNHLYHWHPLMPDSFKVGSQEYSYEQFLFNTSMLVDYGVEALVDAFSRQIAGRIGGGRNMDHHILHVAVDVIRESREMRLQPFNEYRKRFGMKPYTSFQELVGEKEMAAELEELYGDIDALEFYPGLLLEKCHPNSIFGESMIEIGAPFSLKGLLGNPICSPEYWKPSTFGGEVGFNIVKTATLKKLVCLNTKTCPYVSFRVPDASQDDGPAVERPSTEL

SEQ ID NO: 115 - protein, 562 aa, Homo sapiens
MSRSLLLWFLLFLLLLPPLPVLLADPGAPTPVNPCCYYPCQHQGICVRFGLDRYQCDCTRTGYSGPNCTIPGLWTWLRNSLRPSPSFTHFLLTHGRWFWEFVNATFIREMLMRLVLTVRSNLIPSPPTYNSAHDYISWESFSNVSYYTRILPSVPKDCPTPMGTKGKKQLPDAQLLARRFLLRRKFIPDPQGTNLMFAFFAQHFTHQFFKTSGKMGPGFTKALGHGVDLGHIYGDNLERQYQLRLFKDGKLKYQVLDGEMYPPSVEEAPVLMHYPRGIPPQSQMAVGQEVFGLLPGLMLYATLWLREHNRVCDLLKAEHPTWGDEQLFQTTRLILIGETIKIVIEEYVQQLSGYFLQLKFDPELLFGVQFQYRNRIAMEFNHLYHWHPLMPDSFKIGGGRNMDHHILHVAVDVIRESREMRLQPFNEYRKRFGMKPYTSFQELVGEKEMAAELEELYGDIDALEFYPGLLLEKCHPNSIFGESMIEIGAPFSLKGLLGNPICSPEYWKPSTFGGEVGFNIVKTATLKKLVCLNTKTCPYVSFRVPDASQDDGPAVERPSTEL

SEQ ID NO: 116 - protein, 537 aa, Homo sapiens
MRKPRLMNPCCYYPCQHQGICVRFGLDRYQCDCTRTGYSGPNCTIPGLWTWLRNSLRPSPSFTHFLLTHGRWFWEFVNATFIREMLMRLVLTVRSNLIPSPPTYNSAHDYISWESFSNVSYYTRILPSVPKDCPTPMGTKGKKQLPDAQLLARRFLLRRKFIPDPQGTNLMFAFFAQHFTHQFFKTSGKMGPGFTKALGHGVDLGHIYGDNLERQYQLRLFKDGKLKYQVLDGEMYPPSVEEAPVLMHYPRGIPPQSQMAVGQEVFGLLPGLMLYATLWLREHNRVCDLLKAEHPTWGDEQLFQTTRLILIGETIKIVIEEYVQQLSGYFLQLKFDPELLFGVQFQYRNRIAMEFNHLYHWHPLMPDSFKIGGGRNMDHHILHVAVDVIRESREMRLQPFNEYRKRFGMKPYTSFQELVGEKEMAAELEELYGDIDALEFYPGLLLEKCHPNSIFGESMIEIGAPFSLKGLLGNPICSPEYWKPSTFGGEVGFNIVKTATLKKLVCLNTKTCPYVSFRVPDASQDDGPAVERPSTEL

SEQ ID NO: 117 - protein, 490 aa, Homo sapiens
MLMRLVLTVRSNLIPSPPTYNSAHDYISWESFSNVSYYTRILPSVPKDCPTPMGTKGKKQLPDAQLLARRFLLRRKFIPDPQGTNLMFAFFAQHFTHQFFKTSGKMGPGFTKALGHGVDLGHIYGDNLERQYQLRLFKDGKLKYQVLDGEMYPPSVEEAPVLMHYPRGIPPQSQMAVGQEVFGLLPGLMLYATLWLREHNRVCDLLKAEHPTWGDEQLFQTTRLILIGETIKIVIEEYVQQLSGYFLQLKFDPELLFGVQFQYRNRIAMEFNHLYHWHPLMPDSFKVGSQEYSYEQFLFNTSMLVDYGVEALVDAFSRQIAGRIGGGRNMDHHILHVAVDVIRESREMRLQPFNEYRKRFGMKPYTSFQELVGEKEMAAELEELYGDIDALEFYPGLLLEKCHPNSIFGESMIEIGAPFSLKGLLGNPICSPEYWKPSTFGGEVGFNIVKTATLKKLVCLNTKTCPYVSFRVPDASQDDGPAVERPSTEL

SEQ ID NO: 118 - protein, 630 aa, Homo sapiens
MSRECDPGARWGIFLASGGALNARLSPSSLSSAGSLLLWFLLFLLLLPPLPVLLADPGAPTPVNPCCYYPCQHQGICVRFGLDRYQCDCTRTGYSGPNCTIPGLWTWLRNSLRPSPSFTHFLLTHGRWFWEFVNATFIREMLMRLVLTVRSNLIPSPPTYNSAHDYISWESFSNVSYYTRILPSVPKDCPTPMGTKGKKQLPDAQLLARRFLLRRKFIPDPQGTNLMFAFFAQHFTHQFFKTSGKMGPGFTKALGHGVDLGHIYGDNLERQYQLRLFKDGKLKYQVLDGEMYPPSVEEAPVLMHYPRGIPPQSQMAVGQEVFGLLPGLMLYATLWLREHNRVCDLLKAEHPTWGDEQLFQTTRLILIGETIKIVIEEYVQQLSGYFLQLKFDPELLFGVQFQYRNRIAMEFNHLYHWHPLMPDSFKVGSQEYSYEQFLFNTSMLVDYGVEALVDAFSRQIAGRIGGGRNMDHHILHVAVDVIRESREMRLQPFNEYRKRFGMKPYTSFQELVGEKEMAAELEELYGDIDALEFYPGLLLEKCHPNSIFGESMIEIGAPFSLKGLLGNPICSPEYWKPSTFGGEVGFNIVKTATLKKLVCLNTKTCPYVSFRVPDASQDDGPAVERPSTEL

SEQ ID NO: 119 - protein, 630 aa, Homo sapiens
MSRECDPGARWGIFLASWWSLECQLSPSSLSSAGSLLLWFLLFLLLLPPLPVLLADPGAPTPVNPCCYYPCQHQGICVRFGLDRYQCDCTRTGYSGPNCTIPGLWTWLRNSLRPSPSFTHFLLTHGRWFWEFVNATFIREMLMRLVLTVRSNLIPSPPTYNSAHDYISWESFSNVSYYTRILPSVPKDCPTPMGTKGKKQLPDAQLLARRFLLRRKFIPDPQGTNLMFAFFAQHFTHQFFKTSGKMGPGFTKALGHGVDLGHIYGDNLERQYQLRLFKDGKLKYQVLDGEMYPPSVEEAPVLMHYPRGIPPQSQMAVGQEVFGLLPGLMLYATLWLREHNRVCDLLKAEHPTWGDEQLFQTTRLILIGETIKIVIEEYVQQLSGYFLQLKFDPELLFGVQFQYRNRIAMEFNHLYHWHPLMPDSFKVGSQEYSYEQFLFNTSMLVDYGVEALVDAFSRQIAGRIGGGRNMDHHILHVAVDVIRESREMRLQPFNEYRKRFGMKPYTSFQELVGEKEMAAELEELYGDIDALEFYPGLLLEKCHPNSIFGESMIEIGAPFSLKGLLGNPICSPEYWKPSTFGGEVGFNIVKTATLKKLVCLNTKTCPYVSFRVPDASQDDGPAVERPSTEL

SEQ ID NO: 120 - protein, 256 aa, Homo sapiens
MAHRPPSPALASVLLALLLSGAARAAEIVGGHEAQPHSRPYMASLQMRGNPGSHFCGGTLIHPSFVLTAAHCLRDIPQRLVNVVLGAHNVRTQEPTQQHFSVAQVFLNNYDAENKLNDVLLIQLSSPANLSASVATVQLPQQDQPVPHGTQCLAMGWGRVGAHDPPAQVLQELNVTVVTFFCRPHNICTFVPRRKAGICFGDSGGPLICDGIIQGIDSFVIWGCATRLFPDFFTRVALYVDWIRSTLRRVEAKGRP

SEQ ID NO: 121 - protein, 157 aa, Homo sapiens
MSSEEGKLFVGGLNFNTDEQALEDHFSSFGPISEVVVVKDRETQRSRGFGFITFTNPEHASVAMRAMNGESLDGRQIRVDHAGKSARGTRGGGFGAHGRGRSYSRGGGDQGYGSGRYYDSRPGGYGYGYGRSRDYNGRNQGGYDRYSGGNYRDNYDN

SEQ ID NO: 122 - protein, 223 aa, Homo sapiens
MNKPLLWISVLTSLLEAFAHTDLSGKVFVFPRESVTDHVNLITPLEKPLQNFTLCFRAYSDLSRAYSLFSYNTQGRDNELLVYKERVGEYSLYIGRHKVTSKVIEKFPAPVHICVSWESSSGIAEFWINGTPLVKKGLRQGYFVEAQPKIVLGQEQDSYGGKFDRSQSFVGEIGDLYMWDSVLPPENILSAYQGTPLPANILDWQALNYEIRGYVIIKPLVWV

SEQ ID NO: 123 - protein, 245 aa, Homo sapiens
MAEIHTPYSSLKKLLSLLNGFVAVSGIILVGLGIGGKCGGASLTNVLGLSSAYLLHVGNLCLVMGCITVLLGCAGWYGATKESRGTLLFCILSMVIVLIMEVTAATVVLLFFPIVGDVALEHTFVTLRKNYRGYNEPDDYSTQWNLVMEKLKCCGVNNYTDFSGSSFEMTTGHTYPRSCCKSIGSVSCDGRDVSPNVIHQKGCFHKLLKITKTQSFTLSGSSLGAAVIQRWGSRYVAQAGLELLA

SEQ ID NO: 124 - protein, 244 aa, Homo sapiens
MAEIHTPYSSLKKLLSLLNGFVAVSGIILVGLGIGGKCGGASLTNVLGLSSAYLLHVGNLCLVMGCITVLLGCAGWYGATKESRGTLLFCILSMVIVLIMEVTAATVVLLFFPIVGDVALEHTFVTLRKNYRGYNEPDDYSTQWNLVMEKLKCCGVNNYTDFSGSSFEMTTGHTYPRSCCKSIGSVSCDGRDVSPNVIHQKGCFHKLLKITKTQSFTLSGSSLGAAVIQLPGILATLLLFIKLG

SEQ ID NO: 125 - protein, 219 aa, Homo sapiens
MAEIHTPYSSLKKLLSLLNGFVAVSGIILVGLGIGGKCGGASLTNVLGLSSAYLLHVGNLCLVMGCITVLLGCAGWYGATKESRGTLLFVGDVALEHTFVTLRKNYRGYNEPDDYSTQWNLVMEKLKCCGVNNYTDFSGSSFEMTTGHTYPRSCCKSIGSVSCDGRDVSPNVIHQKGCFHKLLKITKTQSFTLSGSSLGAAVIQLPGILATLLLFIKLG

SEQ ID NO: 126 - protein, 160 aa, Homo sapiens
MAEIHTPYSSLKKLLSLLNGFVAVSGIILVGLGIGGKCGGASLTNVLGLSSAYLLHVGNLCLVMGCITVLLGCAGWYGATKESRGTLLFCILSMVIVLIMEVTAATVVLLFFPIVGDVALEHTFVTLRKNYRGYNEPDDYSTQWNLVMEKGLSKYFFSSL

SEQ ID NO: 127 - protein, 431 aa, Homo sapiens
MRALLARLLLCVLVVSDSKGSNELHQVPSNCDCLNGGTCVSNKYFSNIHWCNCPKKFGGQHCEIDKSKTCYEGNGHFYRGKASTDTMGRPCLPWNSATVLQQTYHAHRSDALQLGLGKHNYCRNPDNRRRPWCYVQVGLKPLVQECMVHDCADGKKPSSPPEELKFQCGQKTLRPRFKIIGGEFTTIENQPWFAAIYRRHRGGSVTYVCGGSLISPCWVISATHCFIDYPKKEDYIVYLGRSRLNSNTQGEMKFEVENLILHKDYSADTLAHHNDIALLKIRSKEGRCAQPSRTIQTICLPSMYNDPQFGTSCEITGFGKENSTDYLYPEQLKMTVVKLISHRECQQPHYYGSEVTTKMLCAADPQWKTDSCQGDSGGPLVCSLQGRMTLTGIVSWGRGCALKDKPGVYTRVSHFLPWIRSHTKEENGLAL

SEQ ID NO: 128 - protein, 414 aa, Homo sapiens
MVFHLRTRYEQANCDCLNGGTCVSNKYFSNIHWCNCPKKFGGQHCEIDKSKTCYEGNGHFYRGKASTDTMGRPCLPWNSATVLQQTYHAHRSDALQLGLGKHNYCRNPDNRRRPWCYVQVGLKPLVQECMVHDCADGKKPSSPPEELKFQCGQKTLRPRFKIIGGEFTTIENQPWFAAIYRRHRGGSVTYVCGGSLISPCWVISATHCFIDYPKKEDYIVYLGRSRLNSNTQGEMKFEVENLILHKDYSADTLAHHNDIALLKIRSKEGRCAQPSRTIQTICLPSMYNDPQFGTSCEITGFGKENSTDYLYPEQLKMTVVKLISHRECQQPHYYGSEVTTKMLCAADPQWKTDSCQGDSGGPLVCSLQGRMTLTGIVSWGRGCALKDKPGVYTRVSHFLPWIRSHTKEENGLAL

SEQ ID NO: 129 - protein, 591 aa, Homo sapiens
MKYILVTGGVISGIGKGIIASSVGTILKSCGLHVTSIKIDPYINIDAGTFSPYEHGEVFVLDDGGEVDLDLGNYERFLDIRLTKDNNLTTGKIYQYVINKERKGDYLGKTVQVVPHITDAIQEWVMRQALIPVDEDGLEPQVCVIELGGTVGDIESMPFIEAFRQFQFKVKRENFCNIHVSLVPQPSSTGEQKTKPTQNSVRELRGLGLSPDLVVCRCSNPLDTSVKEKISMFCHVEPEQVICVHDVSSIYRVPLLLEEQGVVDYFLRRLDLPIERQPRKMLMKWKEMADRYDRLLETCSIALVGKYTKFSDSYASVIKALEHSALAINHKLEIKYIDSADLEPITSQEEPVRYHEAWQKLCSAHGVLVPGGFGVRGTEGKIQAIAWARNQKKPFLGVCLGMQLAVVEFSRNVLGWQDANSTEFDPTTSHPVVVDMPEHNPGQMGGTMRLGKRRTLFQTKNSVMRKLYGDADYLEERHRHRFEVNPVWKKCLEEQGLKFVGQDVEGERMEIVELEDHPFFVGVQYHPEFLSRPIKPSPPYFGLLLASVGRLSHYLQKGCRLSPRDTYSDRSGSSSPDSEITELKFPSINHD

SEQ ID NO: 130 - protein, 360 aa, Homo sapiens
MFCHVEPEQVICVHDVSSIYRVPLLLEEQGVVDYFLRRLDLPIERQPRKMLMKWKEMADRYDRLLETCSIALVGKYTKFSDSYASVIKALEHSALAINHKLEIKYIDSADLEPITSQEEPVRYHEAWQKLCSAHGVLVPGGFGVRGTEGKIQAIAWARNQKKPFLGVCLGMQLAVVEFSRNVLGWQDANSTEFDPTTSHPVVVDMPEHNPGQMGGTMRLGKRRTLFQTKNSVMRKLYGDADYLEERHRHRFEVNPVWKKCLEEQGLKFVGQDVEGERMEIVELEDHPFFVGVQYHPEFLSRPIKPSPPYFGLLLASVGRLSHYLQKGCRLSPRDTYSDRSGSSSPDSEITELKFPSINHD

SEQ ID NO: 131 - protein, 209 aa, Homo sapiens
MELNSLLILLEAAEYLERRDREAEHGYASVLPFDGDFAREKTKAAGLVRKAPNNRSSHNELEKHRRAKLRLYLEQLKQLVPLGPDSTRHTTLSLLKRAKVHIKKLEEQDRRALSIKEQLQQEHRFLKRRLEQLSVQSVERVRTDSTGSAVSTDDSEQEVDIEGMEFGPGELDSVGSSSDADDHYSLQSGTGGDSGFGPHCRRLGRPALS

SEQ ID NO: 132 - protein, 222 aa, Homo sapiens
MCLRLGGLSVGDFRKVLMKTGLVLVVLGHVSFITAALFHGTVLRYVGTPQDAVALQYCVVNILSVTSAIVVITSGIAAIVLSRYLPSTPLRWTVFSSSVACALLSLTCALGLLASIAMTFATQGKALLAACTFGSSELLALAPDCPFDPTRIYSSSLCLWGIALVLCVAENVFAVRCAQLTHQLLELRPWWGKSSHHMMRENPELVEGRDLLSCTSSEPLTL

SEQ ID NO: 133 - protein, 202 aa, Homo sapiens
MCLRLGGLSVGDFRKVLMKTGLVLVVLGHVSFITAALFHGTVLRYVGTPQDAVALQYCVVNILSVTSAIVRWTVFSSSVACALLSLTCALGLLASIAMTFATQGKALLAACTFGSSELLALAPDCPFDPTRIYSSSLCLWGIALVLCVAENVFAVRCAQLTHQLLELRPWWGKSSHHMMRENPELVEGRDLLSCTSSEPLTL

SEQ ID NO: 134 - protein, 169 aa, Homo sapiens
MCLRLGGLSVGDFRKVLMKTGLVLVVLGHVSFITAALFHGTVLRYVGTPQDAVALQYCVVNILSVTSAIVGKALLAACTFGSSELLALAPDCPFDPTRIYSSSLCLWGIALVLCVAENVFAVRCAQLTHQLLELRPWWGKSSHHMMRENPELVEGRDLLSCTSSEPLTL

SEQ ID NO: 135 - protein, 375 aa, Homo sapiens
MDDDIAALVVDNGSGMCKAGFAGDDAPRAVFPSIVGRPRHQGVMVGMGQKDSYVGDEAQSKRGILTLKYPIEHGIVTNWDDMEKIWHHTFYNELRVAPEEHPVLLTEAPLNPKANREKMTQIMFETFNTPAMYVAIQAVLSLYASGRTTGIVMDSGDGVTHTVPIYEGYALPHAILRLDLAGRDLTDYLMKILTERGYSFTTTAEREIVRDIKEKLCYVALDFEQEMATAASSSSLEKSYELPDGQVITIGNERFRCPEALFQPSFLGMESCGIHETTFNSIMKCDVDIRKDLYANTVLSGGTTMYPGIADRMQKEITALAPSTMKIKIIAPPERKYSVWIGGSILASLSTFQQMWISKQEYDESGPSIVHRKCF

SEQ ID NO: 136 - protein, 277 aa, Homo sapiens
MENTENSVDSKSIKNLEPKIIHGSESMDSGISLDNSYKMDYPEMGLCIIINNKNFHKSTGMTSRSGTDVDAANLRETFRNLKYEVRNKNDLTREEIVELMRDVSKEDHSKRSSFVCVLLSHGEEGIIFGTNGPVDLKKITNFFRGDRCRSLTGKPKLFIIQACRGTELDCGIETDSGVDDDMACHKIPVEADFLYAYSTAPGYYSWRNSKDGSWFIQSLCAMLKQYADKLEFMHILTRVNRKVATEFESFSFDATFHAKKQIPCIVSMLTKELYFYH

SEQ ID NO: 137 - protein, 381 aa, Homo sapiens
MTVARPSVPAALPLLGELPRLLLLVLLCLPAVWGDCGLPPDVPNAQPALEGRTSFPEDTVITYKCEESFVKIPGEKDSVICLKGSQWSDIEEFCNRSCEVPTRLNSASLKQPYITQNYFPVGTVVEYECRPGYRREPSLSPKLTCLQNLKWSTAVEFCKKKSCPNPGEIRNGQIDVPGGILFGATISFSCNTGYKLFGSTSSFCLISGSSVQWSDPLPECREIYCPAPPQIDNGIIQGERDHYGYRQSVTYACNKGFTMIGEHSIYCTVNNDEGEWSGPPPECRGKSLTSKVPPTVQKPTTVNVPTTEVSPTSQKTTTKTTTPNAQATRSTPVSRTTKHFHETTPNKGSGTTSGTTRLLSGHTCFTLTGLLGTLVTMGLLT

SEQ ID NO: 138 - protein, 440 aa, Homo sapiens
MTVARPSVPAALPLLGELPRLLLLVLLCLPAVWGDCGLPPDVPNAQPALEGRTSFPEDTVITYKCEESFVKIPGEKDSVICLKGSQWSDIEEFCNRSCEVPTRLNSASLKQPYITQNYFPVGTVVEYECRPGYRREPSLSPKLTCLQNLKWSTAVEFCKKKSCPNPGEIRNGQIDVPGGILFGATISFSCNTGYKLFGSTSSFCLISGSSVQWSDPLPECREIYCPAPPQIDNGIIQGERDHYGYRQSVTYACNKGFTMIGEHSIYCTVNNDEGEWSGPPPECRGKSLTSKVPPTVQKPTTVNVPTTEVSPTSQKTTTKTTTPNAQATRSTPVSRTTKHFHETTPNKGSGTTSGTTRLLSGSRPVTQAGMRWCDRSSLQSRTPGFKRSFHFSLPSSWYYRAHVFHVDRFAWDASNHGLADLAKEELRRKYTQVYRLFLVS

SEQ ID NO: 139 - protein, 384 aa, Homo sapiens
MTVARPSVPAALPLLGELPRLLLLVLLCLPAVWGDCGLPPDVPNAQPALEGRTSFPEDTVITYKCEESFVKIPGEKDSVICLKGSQWSDIEEFCNRSCEVPTRLNSASLKQPYITQNYFPVGTVVEYECRPGYRREPSLSPKLTCLQNLKWSTAVEFCKKKSCPNPGEIRNGQIDVPGGILFGATISFSCNTGYKLFGSTSSFCLISGSSVQWSDPLPECREIYCPAPPQIDNGIIQGERDHYGYRQSVTYACNKGFTMIGEHSIYCTVNNDEGEWSGPPPECRGKSLTSKVPPTVQKPTTVNVPTTEVSPTSQKTTTKTTTPNAQATRSTPVSRTTKHFHETTPNKGSGTTSGTTRLLSALQVRPFEVSGSSHISSKKMMCIL

SEQ ID NO: 140 - protein, 364 aa, Homo sapiens
MTVARPSVPAALPLLGELPRLLLLVLLCLPAVWGDCGLPPDVPNAQPALEGRTSFPEDTVITYKCEESFVKIPGEKDSVICLKGSQWSDIEEFCNRSCEVPTRLNSASLKQPYITQNYFPVGTVVEYECRPGYRREPSLSPKLTCLQNLKWSTAVEFCKKKSCPNPGEIRNGQIDVPGGILFGATISFSCNTGYKLFGSTSSFCLISGSSVQWSDPLPECREIYCPAPPQIDNGIIQGERDHYGYRQSVTYACNKGFTMIGEHSIYCTVNNDEGEWSGPPPECRGKSLTSKVPPTVQKPTTVNVPTTEVSPTSQKTTTKTTTPNAQATRSTPVSRTTKHFHETTPNKGSGTTSGTTRLLSVLFM

SEQ ID NO: 141 - protein, 439 aa, Homo sapiens
MTVARPSVPAALPLLGELPRLLLLVLLCLPAVWGDCGLPPDVPNAQPALEGRTSFPEDTVITYKCEESFVKIPGEKDSVICLKGSQWSDIEEFCNRSCEVPTRLNSASLKQPYITQNYFPVGTVVEYECRPGYRREPSLSPKLTCLQNLKWSTAVEFCKKKSCPNPGEIRNGQIDVPGGILFGATISFSCNTGYKLFGSTSSFCLISGSSVQWSDPLPECREIYCPAPPQIDNGIIQGERDHYGYRQSVTYACNKGFTMIGEHSIYCTVNNDEGEWSGPPPECRGKSLTSKVPPTVQKPTTVNVPTTEVSPTSQKTTTKTTTPNAQATRSTPVSRTTKHFHETTPNKGSGTTSGTTRLLSETVFHRVIQDGLDLLASRSACLGLPKCWDYRREPPHLARAHVFHVDRFAWDASNHGLADLAKEELRRKYTQVYRLFLVS

SEQ ID NO: 142 - protein, 525 aa, Homo sapiens
MTVARPSVPAALPLLGELPRLLLLVLLCLPAVWGDCGLPPDVPNAQPALEGRTSFPEDTVITYKCEESFVKIPGEKDSVICLKGSQWSDIEEFCNRSCEVPTRLNSASLKQPYITQNYFPVGTVVEYECRPGYRREPSLSPKLTCLQNLKWSTAVEFCKKKSCPNPGEIRNGQIDVPGGILFGATISFSCNTGYKLFGSTSSFCLISGSSVQWSDPLPECREIYCPAPPQIDNGIIQGERDHYGYRQSVTYACNKGFTMIGEHSIYCTVNNDEGEWSGPPPECRGKSLTSKVPPTVQKPTTVNVPTTEVSPTSQKTTTKTTTPNAQGTETPSVLQKHTTENVSATRTPPTPQKPTTVNVPATIVTPTPQKPTTINVPATGVSSTPQRHTIVNVSATGTLPTLQKPTRANDSATKSPAAAQTSFISKTLSTKTPSAAQNPMMTNASATQATLTAQKFTTAKVAFTQSPSAAPTRSTPVSRTTKHFHETTPNKGSGTTSGTTRLLSGHTCFTLTGLLGTLVTMGLLT

SEQ ID NO: 143 - protein, 551 aa, Homo sapiens
MTVARPSVPAALPLLGELPRLLLLVLLCLPAVWGDCGLPPDVPNAQPALEGRTSFPEDTVITYKCEESFVKIPGEKDSVICLKGSQWSDIEEFCNRSCEVPTRLNSASLKQPYITQNYFPVGTVVEYECRPGYRREPSLSPKLTCLQNLKWSTAVEFCKKKSCPNPGEIRNGQIDVPGGILFGATISFSCNTGYKLFGSTSSFCLISGSSVQWSDPLPECREIYCPAPPQIDNGIIQGERDHYGYRQSVTYACNKGFTMIGEHSIYCTVNNDEGEWSGPPPECRGKSLTSKVPPTVQKPTTVNVPTTEVSPTSQKTTTKTTTPNAQGTETPSVLQKHTTENVSATRTPPTPQKPTTVNVPATIVTPTPQKPTTINVPATGVSSTPQRHTIVNVSATGTLPTLQKPTRANDSATKSPAAAQTSFISKTLSTKTPSAAQNPMMTNASATQATLTAQKFTTAKVAFTQSPSAARKSTNVHSPVTNGLKSTQRFPSAHITATRSTPVSRTTKHFHETTPNKGSGTTSGTTRLLSGHTCFTLTGLLGTLVTMGLLT

SEQ ID NO: 144 - protein, 209 aa, Homo sapiens
MGKGDPNKPRGKMSSYAFFVQTCREEHKKKHPDSSVNFAEFSKKCSERWKTMSAKEKSKFEDMAKSDKARYDREMKNYVPPKGDKKGKKKDPNAPKRPPSAFFLFCSEHRPKIKSEHPGLSIGDTAKKLGEMWSEQSAKDKQPYEQKAAKLKEKYEKDIAAYRAKGKSEAGKKGPGRPTGSKKKNEPEDEEEEEEEEDEDEEEEDEDEE

SEQ ID NO: 145 - protein, 304 aa, Homo sapiens
MFNSVNLGNFCSPSRKERGADFGERGSCASNLYLPSCTYYMPEFSTVSSFLPQAPSRQISYPYSAQVPPVREVSYGLEPSGKWHHRNSYSSCYAAADELMHRECLPPSTVTEILMKNEGSYGGHHHPSAPHATPAGFYSSVNKNSVLPQAFDRFFDNAYCGGGDPPAEPPCSGKGEAKGEPEAPPASGLASRAEAGAEAEAEEENTNPSSSGSAHSVAKEPAKGAAPNAPRTRKKRCPYSKFQIRELEREFFFNVYINKEKRLQLSRMLNLTDRQVKIWFQNRRMKEKKLSRDRLQYFSGNPLL

SEQ ID NO: 146 - protein, 532 aa, Homo sapiens
MAPSSPRPALPALLVLLGALFPGPGNAQTSVSPSKVILPRGGSVLVTCSTSCDQPKLLGIETPLPKKELLLPGNNRKVYELSNVQEDSQPMCYSNCPDGQSTAKTFLTVYWTPERVELAPLPSWQPVGKNLTLRCQVEGGAPRANLTVVLLRGEKELKREPAVGEPAEVTTTVLVRRDHHGANFSCRTELDLRPQGLELFENTSAPYQLQTFVLPATPPQLVSPRVLEVDTQGTVVCSLDGLFPVSEAQVHLALGDQRLNPTVTYGNDSFSAKASVSVTAEDEGTQRLTCAVILGNQSQETLQTVTIYSFPAPNVILTKPEVSEGTEVTVKCEAHPRAKVTLNGVPAQPLGPRAQLLLKATPEDNGRSFSCSATLEVAGQLIHKNQTRELRVLYGPRLDERDCPGNWTWPENSQQTPMCQAWGNPLPELKCLKDGTFPLPIGESVTVTRDLEGTYLCRARSTQGEVTRKVTVNVLSPRYEIVIITVVAAAVIMGTAGLSTYLYNRQRKIKKYRLQQAQKGTPMKPNTQATPP

SEQ ID NO: 147 - protein, 219 aa, Homo sapiens
MCPARSLLLVATLVLLDHLSLARNLPVATPDPGMFPCLHHSQNLLRAVSNMLQKARQTLEFYPCTSEEIDHEDITKDKTSTVEACLPLELTKNESCLNSRETSFITNGSCLASRKTSFMMALCLSSIYEDLKMYQVEFKTMNAKLLMDPKRQIFLDQNMLAVIDELMQALNFNSETVPQKSSLEEPDFYKTKIKLCILLHAFRIRAVTIDRVMSYLNAS

SEQ ID NO: 148 - protein, 359 aa, Homo sapiens
MVDMDKLINNLEVQLNSEGGSMQVFKQVTASVRNRDPPEIEYRSNMTSPTLLDANPMENPALFNDIKIEPPEELLASDFSLPQVEPVDLSFHKPKAPLQPASMLQAPIRPPKPQSSPQTLVVSTSTSDMSTSANIPTVLTPGSVLTSSQSTGSQQILHVIHTIPSVSLPNKMGGLKTIPVVVQSLPMVYTTLPADGGPAAITVPLIGGDGKNAGSVKVDPTSMSPLEIPSDSEESTIESGSSALQSLQGLQQEPAAMAQMQGEESLDLKRRRIHQCDFAGCSKVYTKSSHLKAHRRIHTGEKPYKCTWDGCSWKFARSDELTRHFRKHTGIKPFRCTDCNRSFSRSDHLSLHRRRHDTM

SEQ ID NO: 149 - protein, 257 aa, Homo sapiens
MVDMDKLINNLEVQLNSEGGSMQVFKQVTASVRNRDPPEIEYRSNMTSPTLLDANPMENPALFNDIKIEPPEELLASDFSLPQVEPVDLSFHKPKAPLQPASMLQAPIRPPKPQSSPQTLVVSTSTSDMSTSANIPTVLTPGSVLTSSQSTGSQQILHVIHTIPSVSLPNKMGGLKTIPVVVQSLPMVYTTLPADGGPAAITVPLIGGDGKNAGSVKVDPTSMSPLEIPSDSEESTIESGSSALQSLQGLQQEREAL

SEQ ID NO: 150 - protein, 252 aa, Homo sapiens
MSLPEDGMSSGHFRSPQLVTWSVTASVRNRDPPEIEYRSNMTSPTLLDANPMENPALFNDIKIEPPEELLASDFSLPQVEPVDLSFHKPKAPLQPASMLQAPIRPPKPQSSPQTLVVSTSTSDMSTSANIPTVLTPGSVLTSSQSTGSQQILHVIHTIPSVSLPNKMGGLKTIPVVVQSLPMVYTTLPADGGPAAITVPLIGGDGKNAGSVKVDPTSMSPLEIPSDSEESTIESGSSALQSLQGLQQEREAL

SEQ ID NO: 151 - protein, 275 aa, Homo sapiens
MVDMDKLINNLEVQLNSEGGSMQVFKQVTASVRNRDPPEIEYRSNMTSPTLLDANPMENPALFNDIKIEPPEELLASDFSLPQVEPVDLSFHKPKAPLQPASMLQAPIRPPKPQSSPQTLVVSTSTSDMSTSANIPTVLTPGSVLTSSQSTGSQQILHVIHTIPSVSLPNKMGGLKTIPVVVQSLPMVYTTLPADGGPAAITVPLIGGDGKNAGSGEKPYKCTWDGCSWKFARSDELTRHFRKHTGIKPFRCTDCNRSFSRSDHLSLHRRRHDTM

SEQ ID NO: 152 - protein, 323 aa, Homo sapiens
MAYVPAPGYQPTYNPTLPYYQPIPGGLNVGMSVYIQGVASEHMKRFFVNFVVGQDPGSDVAFHFNPRFDGWDKVVFNTLQGGKWGSEERKRSMPFKKGAAFELVFIVLAEHYKVVVNGNPFYEYGHRLPLQMVTHLQVDGDLQLQSINFIGGQPLRPQGPPMMPPYPGPGHCHQQLNSLPTMEGPPTFNPPVPYFGRLQGGLTARRTIIIKGYVPPTGKSFAINFKVGSSGDIALHINPRMGNGTVVRNSLLNGSWGSEEKKITHNPFGPGQFFDLSIRCGLDRFKVYANGQHLFDFAHRLSAFQRVDTLEIQGDVTLSYVQI

SEQ ID NO: 153 - protein, 161 aa, Homo sapiens
MGCCYSSENEDSDQDREERKLLLDPSSPPTKALNGAEPNYHSLPSARTDEQALLSSILAKTASNIIDVSAADSQGMEQHEYMDRARQYSTRLAVLSSSLTHWKKLPPLPSLTSQPHQVLASEPIPFSDLQQVSRIAAYAYSALSQIRVDAKEELVVQFGIP

SEQ ID NO: 154 - protein, 372 aa, Homo sapiens [sequence omitted]

SEQ ID NO: 155 - protein, 385 aa, Homo sapiens
MGCRRTREGPSKAMIFPWKCQSTQRDLWNIFKLWGWTMLCCDFLAHHGTDCWTYHYSEKPMNWQRARRFCRDNYTDLVAIQNKAEIEYLEKTLPFSRSYYWIGIRKIGGIWTWVGTNKSLTEEAENWGDGEPNNKKNKEDCVEIYIKRNKDAGKWNDDACHKLKAALCYTASCQPWSCSGHGECVEIINNYTCNCDVGYYGPQCQFVIQCEPLEAPELGTMDCTHPLGNFSFSSQCAFSCSEGTNLTGIEETTCGPFGNWSSPEPTCQVIQCEPLSAPDLGIMNCSHPLASFSFTSACTFICSEGTELIGKKKTICESSGIWSNPSPICQKLDKSFSMIKEGDYNPLFIPVAVMVTAFSGLAFIIWLARRLKKGKKSKRSMNDPY

SEQ ID NO: 156 - protein, 379 aa, Homo sapiens
MAAAAAQGGGGGEPRRTEGVGPGVPGEVEMVKGQPFDVGPRYTQLQYIGEGAYGMVSSAYDHVRKTRVAIKKISPFEHQTYCQRTLREIQILLRFRHENVIGIRDILRASTLEAMRDVYIVQDLMETDLYKLLKSQQLSNDHICYFLYQILRGLKYIHSANVLHRDLKPSNLLINTTCDLKICDFGLARIADPEHDHTGFLTEYVATRWYRAPEIMLNSKGYTKSIDIWSVGCILAEMLSNRPIFPGKHYLDQLNHILGILGSPSQEDLNCIINMKARNYLQSLPSKTKVAWAKLFPKSDSKALDLLDRMLTFNPNKRITVEEALAHPYLEQYYDPTDEPVAEEPFTFAMELDDLPKERLKELIFQETARFQPGVLEAP

SEQ ID NO: 157 - protein, 335 aa, Homo sapiens
MAAAAAQGGGGGEPRRTEGVGPGVPGEVEMVKGQPFDVGPRYTQLQYIGEGAYGMVSSAYDHVRKTRVAIKKISPFEHQTYCQRTLREIQILLRFRHENVIGIRDILRASTLEAMRDVYIVQDLMETDLYKLLKSQQLSNDHICYFLYQILRGLKYIHSANVLHRDLKPSNLLINTTCDLKICDFGLARIADPEHDHTGFLTEYVATRWYRAPEIMLNSKGYTKSIDIWSVGCILAEMLSNRPIFPGKHYLDQLNHILALDLLDRMLTFNPNKRITVEEALAHPYLEQYYDPTDEPVAEEPFTFAMELDDLPKERLKELIFQETARFQPGVLEAP

SEQ ID NO: 158 - protein, 357 aa, Homo sapiens
MAAAAAQGGGGGEPRRTEGVGPGVPGEVEMVKGQPFDVGPRYTQLQYIGEGAYGMVSSAYDHVRKTRVAIKKISPFEHQTYCQRTLREIQILLRFRHENVIGIRDILRASTLEAMRDVYIVQDLMETDLYKLLKSQQLSNDHICYFLYQILRGLKYIHSANVLHRDLKPSNLLINTTCDLKICDFGLARIADPEHDHTGFLTEYVATRWYRAPEIMLNSKGYTKSIDIWSVGCILAEMLSNRPIFPGKHYLDQLNHILGILGSPSQEDLNCIINMKARNYLQSLPSKTKVAWAKLFPKSDSKALDLLDRMLTFNPNKRITVEEALAHPYLEQYYDPTDEVGQSPAAVGLGAGEQGGT

SEQ ID NO: 159 - protein, 5762 aa, Homo sapiens
MGAPSACRTLVLALAAMLVVPQAETQGPVEPSWENAGHTMDGGAPTSSPTRRVSFVPPVTVFPSLSPLNPAHNGRVCSTWGDFHYKTFDGDVFRFPGLCNYVFSEHCRAAYEDFNVQLRRGLVGSRPVVTRVVIKAQGLVLEASNGSVLINGQREELPYSRTGLLVEQSGDYIKVSIRLVLTFLWNGEDSALLELDPKYANQTCGLCGDFNGLPAFNEFYAHNARLTPLQFGNLQKLDGPTEQCPDPLPLPAGNCTDEEGICHRTLLGPAFAECHALVDSTAYLAACAQDLCRCPTCPCATFVEYSRQCAHAGGQPRNWRCPELCPRTCPLNMQHQECGSPCTDTCSNPQRAQLCEDHCVDGCFCPPGTVLDDITHSGCLPLGQCPCTHGGRTYSPGTSFNTTCSSCTCSGGLWQCQDLPCPGTCSVQGGAHISTYDEKLYDLHGDCSYVLSKKCADSSFTVLAELRKCGLTDNENCLKAVTLSLDGGDTAIRVQADGGVFLNSIYTQLPLSAANITLFTPSSFFIVVQTGLGLQLLVQLVPLMQVFVRLDPAHQGQMCGLCGNFNQNQADDFTALSGVVEATGAAFANTWKAQAACANARNSFEDPCSLSVENENYARHWCSRLTDPNSAFSRCHSIINPKPFHSNCMFDTCNCERSEDCLCAALSSYVHACAAKGVQLSDWRDGVCTKYMQNCPKSQRYAYVVDACQPTCRGLSEADVTCSVSFVPVDGCTCPAGTFLNDAGACVPAQECPCYAHGTVLAPGEVVHDEGAVCSCTGGKLSCLGASLQKSTGCAAPMVYLDCSNSSAGTPGAECLRSCHTLDVGCFSTHCVSGCVCPPGLVSDGSGGCIAEEDCPCVHNEATYKPGETIRVDCNTCTCRNRRWECSHRLCLGTCVAYGDGHFITFDGDRYSFEGSCEYILAQDYCGDNTTHGTFRIVTENIPCGTTGTTCSKAIKLFVESYELILQEGTFKAVARGPGGDPPYKIRYMGIFLVIETHGMAVSWDRKTSVFIRLHQDYKGRVCGLCGNFDDNAINDFATRSRSVVGDALEFGNSWKLSPSCPDALAPKDPCTANPFRKSWAQKQCSILHGPTFAACRSQVDSTKYYEACVNDACACDSGGDCECFCTAVAAYAQACHDAGLCVSWRTPDTCPLFCDFYNPHGGCEWHYQPCGAPCLKTCRNPSGHCLVDLPGLEGCYPKCPPSQPFFNEDQMKCVAQCGCYDKDGNYYDVGARVPTAENCQSCNCTPSGIQCAHSLEACTCTYEDRTYSYQDVIYNTTDGLGACLIAICGSNGTIIRKAVACPGTPATTPFTFTTAWVPHSTTSPALPVSTVCVREVCRWSSWYNGHRPEPGLGGGDFETFENLRQRGYQVCPVLADIECRAAQLPDMPLEELGQQVDCDRMRGLMCANSQQSPPLCHDYELRVLCCEYVPCGPSPAPGTSPQPSLSASTEPAVPTPTQTTATEKTTLWVTPSIRSTAALTSQTGSSSGPVTVTPSAPGTTTCQPRCQWTEWFDEDYPKSEQLGGDVESYDKIRAAGGHLCQQPKDIECQAESFPNWTLAQVGQKVHCDVHFGLVCRNWEQEGVFKMCYNYRIRVLCCSDDHCRGRATTPPPTTELETATTTTTQALFSTPQPTSSPGLTRAPPASTTAVPTLSEGLTSPRYTSTLGTATTGGPTTPAGSTEPTVPGVATSTLPTRSALPGTTGSLGTWRPSQPPTLAPTTMATSRARPTGTASTASKEPLTTSLAPTLTSELSTSQAETSTPRTETTMSPLTNTTTSQGTTRCQPKCEWTEWFDVDFPTSGVAGGDMETFENIRAAGGKMCWAPKSIECRAENYPEVSIDQVGQVLTCSLETGLTCKNEDQTGRFNMCFNYNVRVLCCDDYSHCPSTPATSSTATPSSTPGTTWILTKPTTTATTTASTGSTATPTSTLRTAPPPKVLTTTATTPTVTSSKATPSSSPGTATALPALRSTATTPTATSVTPIPSSSLGTTWTRLSQTTTPTATMSTATPSSTPETAHTSTVLTATATTTGATGSVATPSSTPGTAHTTKVPTTTTTGFTATPSSSPGTALTPPVWISTTTTPTTRGSTVTPSSIPGTTHTATVLTTTTTTVATGSMATPSSSTQTSGTPPSLTTTATTITATGSTTNPSSTPGTTPIPPVLTTTATTPAATSNTVTPSSALGTTHTPPVPNTMATTHGRSLPPSSPHTVRTAWTSATSGILGTTHITEPSTVTSHTLAATTGTTQHSTPALSSPHPSSRTTESPPSPGTTTPGHTTATSRTTATATPSKTRTSTLLPSSPTSAPITTVVTMGCEPQCAWSEWLDYSYPMPGPSGGDFDTYSNIRAAGGAVCEQPLGLECRAQAQPGVPLRELGQVVECSLDFGLVCRNREQVGKFKMCFNYEIRVFCCNYGHCPSTPATSSTAMPSSTPGTTWILTELTTTATTTESTGSTATPSSTPGTTWILTEPSTTATVTVPTGSTATASSTQATAGTPHVSTTATTPTVTSSKATPFSSPGTATALPALRSTATTPTATSFTAIPSSSLGTTWTRLSQTTTPTATMSTATPSSTPETVHTSTVLTTTATTTGATGSVATPSSTPGTAHTTKVLTTTTTGFTATPSSSPGTARTLPVWISTTTTPTTRGSTVTPSSIPGTTHTPTVLTTTTTTVATGSMATPSSSTQTSGTPPSLTTTATTITATGSTTNPSSTPGTTPIPPVLTTTATTPAATSSTVTPSSALGTTHTPPVPNTTATTHGRSLSPSSPHTVRTAWTSATSGTLGTTHITEPSTGTSHTPAATTGTTQHSTPALSSPHPSSRTTESPPSPGTTTPGHTRATSRTTATATPSKTRTSTLLPSSPTSAPITTVVTMGCEPQCAWSEWLDYSYPMPGPSGGDFDTYSNIRAAGGAVCEQPLGLECRAQAQPGVPLRELGQVVECSLDFGLVCRNREQVGKFKMCFNYEIRVFCCNYGHCPSTPATSSTATPSSTPGTTWILTEQTTAATTTATTGSTAIPSSTPGTAPPPKVLTSTATTPTATSSKATSSSSPRTATTLPVLTSTATKSTATSFTPIPSFTLGTTGTLPEQTTTPMATMSTIHPSSTPETTHTSTVLTTKATTTRATSSMSTPSSTPGTTWILTELTTAATTTAATGPTATPSSTPGTTWILTEPSTTATVTVPTGSTATASSTRATAGTLKVLTSTATTPTVISSRATPSSSPGTATALPALRSTATTPTATSVTAIPSSSLGTAWTRLSQTTTPTATMSTATPSSTPETVHTSTVLTTTTTTTRATGSVATPSSTPGTAHTTKVPTTTTTGFTATPSSSPGTALTPPVWISTTTTPTTRGSTVTPSSIPGTTHTATVLTTTTTTVATGSMATPSSSTQTSGTPPSLTTTATTITATGSTTNPSSTPGTTPIPPVLTTTATTPAATSSTVTPSSALGTTHTPPVPNTTATTHGRSLPPSSPHTVRTAWTSATSGILGTTHITEPSTVTSHTPAATTSTTQHSTPALSSPHPSSRTTESPPSPGTTTPGHTRGTSRTTATATPSKTRTSTLLPSSPTSAPITTVVTTGCEPQCAWSEWLDYSYPMPGPSGGDFDTYSNIRAAGGAVCEQPLGLECRAQAQPGVPLRELGQVVECSLDFGLVCRNREQVGKFKMCFNYEIRVFCCNYGHCPSTPATSSTATPSSTPGTTWILTKLTTTATTTESTGSTATPSSTPGTTWILTEPSTTATVTVPTGSTATASSTQATAGTPHVSTTATTPTVTSSKATPFSSPGTATALPALRSTATTPTATSFTAIPSSSLGTTWTRLSQTTTPTATMSTATPSSTPETAHTSTVLTTTATTTRATGSVATPSSTPGTAHTTKVPTTTTTGFTVTPSSSPGTARTPPVWISTTTTPTTSGSTVTPSSVPGTTHTPTVLTTTTTTVATGSMATPSSSTQTSGTPPSLITTATTITATGSTTNPSSTPGTTPIPPVLTTTATTPAATSSTVTPSSALGTTHTPPVPNTTATTHGRSLSPSSPHTVRTAWTSATSGTLGTTHITEPSTGTSHTPAATTGTTQHSTPALSSPHPSSRTTESPPSPGTTTPGHTTATSRTTATATPSKTRTSTLLPSSPTSAPITTVVTTGCEPQCAWSEWLDYSYPMPGPSGGDFDTYSNIRAAGGAVCEQPLGLECRAQAQPGVPLGELGQVVECSLDFGLVCRNREQVGKFKMCFNYEIRVFCCNYGHCPSTPATSSTAMPSSTPGTTWILTELTTTATTTASTGSTATPSSTPGTAPPPKVLTSPATTPTATSSKATSSSSPRTATTLPVLTSTATKSTATSVTPIPSSTLGTTGTLPEQTTTPVATMSTIHPSSTPETTHTSTVLTTKATTTRATSSTSTPSSTPGTTWILTELTTAATTTAATGPTATPSSTPGTTWILTELTTTATTTASTGSTATPSSTPGTTWILTEPSTTATVTVPTGSTATASSTQATAGTPHVSTTATTPTVTSSKATPSSSPGTATALPALRSTATTPTATSFTAIPSSSLGTTWTRLSQTTTPTATMSTATPSSTPETVHTSTVLTATATTTGATGSVATPSSTPGTAHTTKVPTTTTTGFTATPSSSPGTALTPPVWISTTTTPTTTTPTTSGSTVTPSSIPGTTHTARVLTTTTTTVATGSMATPSSSTQTSGTPPSLTTTATTITATGSTTNPSSTPGTTPITPVLTSTATTPAATSSKATSSSSPRTATTLPVLTSTATKSTATSFTPIPSSTLWTTWTVPAQTTTPMSTMSTIHTSSTPETTHTSTVLTTTATMTRATNSTATPSSTLGTTRILTELTTTATTTAATGSTATLSSTPGTTWILTEPSTIATVMVPTGSTATASSTLGTAHTPKVVTTMATMPTATASTVPSSSTVGTTRTPAVLPSSLPTFSVSTVSSSVLTTLRPTGFPSSHFSTPCFCRAFGQFFSPGEVIYNKTDRAGCHFYAVCNQHCDIDRFQGACPTSPPPVSSAPLSSPSPAPGCDNAIPLRQVNETWTLENCTVARCVGDNRVVLLDPKPVANVTCVNKHLPIKVSDPSQPCDFHYECECICSMWGGSHYSTFDGTSYTFRGNCTYVLMREIHARFGNLSLYLDNHYCTASATAAAARCPRALSIHYKSMDIVLTVTMVHGKEEGLILFDQIPVSSGFSKNGVLVSVLGTTTMRVDIPALGVSVTFNGQVFQARLPYSLFHNNTEGQCGTCTNNQRDDCLQRDGTTAASCKDMAKTWLVPDSRKDGCWAPTGTPPTASPAAPVSSTPTPTPCPPQPLCDLMLSQVFAECHNLVPPGPFFNACISDHCRGRLEVPCQSLEAYAELCRARGVCSDWRGATGGLCDLTCPPTKVYKPCGPIQPATCNSRNQSPQLEGMAEGCFCPEDQILFNAHMGICVQACPCVGPDGFPKFPGERWVSNCQSCVCDEGSVSVQCKPLPCDAQGQPPPCNRPGFVTVTRPRAENPCCPETVCVCNTTTCPQSLPVCPPGQESICTQEEGDCCPTFRCRPQLCSYNGTFYGVGATFPGALPCHMCTCLSGDTQDPTVQCQEDACNNTTCPQGFEYKRVAGQCCGECVQTACLTPDGQPVQLNETWVNSHVDNCTVYLCEAEGGVHLLTPQPASCPDVSSCRGSLRKTGCCYSCEEDSCQVRINTTILWHQGCETEVNITFCEGSCPGASKYSAEAQAMQHQCTCCQERRVHEETVPLHCPNGSAILHTYTHVDECGCTPFCVPAPMAPPHTRGFPAQEATAV

SEQ ID NO: 160 - protein, 902 aa, Homo sapiens
MGAASCEDEELEFKLVFGEEKEAPPLGAGGLGEELDSEDAPPCCRLALGEPPPYGAAPIGIPRPPPPRPGMHSPPPRPAPSPGTWESQPARSVRLGGPGGGAGGAGGGRVLECPSIRITSISPTPEPPAALEDNPDAWGDGSPRDYPPPEGFGGYREAGGQGGGAFFSPSPGSSSLSSWSFFSDASDEAALYAACDEVESELNEAASRFGLGSPLPSPRASPRPWTPEDPWSLYGPSPGGRGPEDSWLLLSAPGPTPASPRPASPCGKRRYSSSGTPSSASPALSRRGSLGEEGSEPPPPPPLPLARDPGSPGPFDYVGAPPAESIPQKTRRTSSEQAVALPRSEEPASCNGKLPLGAEESVAPPGGSRKEVAGMDYLAVPSPLAWSKARIGGHSPIFRTSALPPLDWPLPSQYEQLELRIEVQPRAHHRAHYETEGSRGAVKAAPGGHPVVKLLGYSEKPLTLQMFIGTADERNLRPHAFYQVHRITGKMVATASYEAVVSGTKVLEMTLLPENNMAANIDCAGILKLRNSDIELRKGETDIGRKNTRVRLVFRVHVPQGGGKVVSVQAASVPIECSQRSAQELPQVEAYSPSACSVRGGEELVLTGSNFLPDSKVVFIERGPDGKLQWEEEATVNRLQSNEVTLTLTVPEYSNKRVSRPVQVYFYVSNGRRKRSPTQSFRFLPVICKEEPLPDSSLRGFPSASATPFGTDMDFSPPRPPYPSYPHEDPACETPYLSEGFGYGMPPLYPQTGPPPSYRPGLRMFPETRGTTGCAQPPAVSFLPRPFPSDPYGGRGSSFSLGLPFSPPAPFRPPPLPASPPLEGPFPSQSDVHPLPAEGYNKVGPGYGPGEGAPEQEKSRGGYSSGFRDSVPIQGITLEEVSEIIGRDLSGFPAPPGEEPPA

SEQ ID NO: 161 - protein, 965 aa, Homo sapiens
MITTLPSLLPASLASISHRVTNLPSNSLSHNPGLSKPDFPGNSSPGLPSSSSPGRDLGAPAGSMGAASCEDEELEFKLVFGEEKEAPPLGAGGLGEELDSEDAPPCCRLALGEPPPYGAAPIGIPRPPPPRPGMHSPPPRPAPSPGTWESQPARSVRLGGPGGGAGGAGGGRVLECPSIRITSISPTPEPPAALEDNPDAWGDGSPRDYPPPEGFGGYREAGGQGGGAFFSPSPGSSSLSSWSFFSDASDEAALYAACDEVESELNEAASRFGLGSPLPSPRASPRPWTPEDPWSLYGPSPGGRGPEDSWLLLSAPGPTPASPRPASPCGKRRYSSSGTPSSASPALSRRGSLGEEGSEPPPPPPLPLARDPGSPGPFDYVGAPPAESIPQKTRRTSSEQAVALPRSEEPASCNGKLPLGAEESVAPPGGSRKEVAGMDYLAVPSPLAWSKARIGGHSPIFRTSALPPLDWPLPSQYEQLELRIEVQPRAHHRAHYETEGSRGAVKAAPGGHPVVKLLGYSEKPLTLQMFIGTADERNLRPHAFYQVHRITGKMVATASYEAVVSGTKVLEMTLLPENNMAANIDCAGILKLRNSDIELRKGETDIGRKNTRVRLVFRVHVPQGGGKVVSVQAASVPIECSQRSAQELPQVEAYSPSACSVRGGEELVLTGSNFLPDSKVVFIERGPDGKLQWEEEATVNRLQSNEVTLTLTVPEYSNKRVSRPVQVYFYVSNGRRKRSPTQSFRFLPVICKEEPLPDSSLRGFPSASATPFGTDMDFSPPRPPYPSYPHEDPACETPYLSEGFGYGMPPLYPQTGPPPSYRPGLRMFPETRGTTGCAQPPAVSFLPRPFPSDPYGGRGSSFSLGLPFSPPAPFRPPPLPASPPLEGPFPSQSDVHPLPAEGYNKVGPGYGPGEGAPEQEKSRGGYSSGFRDSVPIQGITLEEVSEIIGRDLSGFPAPPGEEPPA

SEQ ID NO: 162 - protein, 964 aa, Homo sapiens
MITTLPSLLPASLASISHRVTNLPSNSLSHNPGLSKPDFPGNSSPGLPSSSSPGRDLGAPAGSMGAASCEDEELEFKLVFGEEKEAPPLGAGGLGEELDSEDAPPCCRLALGEPPPYGAAPIGIPRPPPPRPGMHSPPPRPAPSPGTWESQPARSVRLGGPGGGAGGAGGGRVLECPSIRITSISPTPEPPAALEDNPDAWGDGSPRDYPPPEGFGGYREAGGQGGGAFFSPSPGSSSLSSWSFFSDASDEAALYAACDEVESELNEAASRFGLGSPLPSPRASPRPWTPEDPWSLYGPSPGGRGPEDSWLLLSAPGPTPASPRPASPCGKRRYSSSGTPSSASPALSRRGSLGEEGSEPPPPPPLPLARDPGSPGPFDYVGAPPAESIPQKTRRTSSEQAVALPRSEEPASCNGKLPLGAEESVAPPGGSRKEVAGMDYLAVPSPLAWSKARIGGHSPIFRTSALPPLDWPLPSQYEQLELRIEVQPRAHHRAHYETEGSRGAVKAAPGGHPVVKLLGYSEKPLTLQMFIGTADERNLRPHAFYQVHRITGKMVATASYEAVVSGTKVLEMTLLPENNMAANIDCAGILKLRNSDIELRKGETDIGRKNTRVRLVFRVHVPQGGGKVVSVQAASVPIECSQRSAQELPQVEAYSPSACSVRGGEELVLTGSNFLPDSKVVFIERGPDGKLQWEEEATVNRLQSNEVTLTLTVPEYSNKRVSRPVQVYFYVSNGRRKRSPTQSFRFLPVICKEEPLPDSSLRGFPSASATPFGTDMDFSPPRPPYPSYPHEDPACETPYLSEGFGYGMPPLYPQTGPPPSYRPGLRMFPETRGTTGCAQPPAVSFLPRPFPSDPYGGRGSSFSLGLPFSPPAPFRPPPLPASPPLEGPFPSQSDVHPLPAEGYNKVGPGYGPGEGAPEQEKSRGGYSSGFRDSVPIQGITLEEGGCGTGGCECECVQEIALHVC

SEQ ID NO: 163 - protein, 934 aa, Homo sapiens
MADGGADSAAQRLPEGPGRVAPGRDLGAPAGSMGAASCEDEELEFKLVFGEEKEAPPLGAGGLGEELDSEDAPPCCRLALGEPPPYGAAPIGIPRPPPPRPGMHSPPPRPAPSPGTWESQPARSVRLGGPGGGAGGAGGGRVLECPSIRITSISPTPEPPAALEDNPDAWGDGSPRDYPPPEGFGGYREAGGQGGGAFFSPSPGSSSLSSWSFFSDASDEAALYAACDEVESELNEAASRFGLGSPLPSPRASPRPWTPEDPWSLYGPSPGGRGPEDSWLLLSAPGPTPASPRPASPCGKRRYSSSGTPSSASPALSRRGSLGEEGSEPPPPPPLPLARDPGSPGPFDYVGAPPAESIPQKTRRTSSEQAVALPRSEEPASCNGKLPLGAEESVAPPGGSRKEVAGMDYLAVPSPLAWSKARIGGHSPIFRTSALPPLDWPLPSQYEQLELRIEVQPRAHHRAHYETEGSRGAVKAAPGGHPVVKLLGYSEKPLTLQMFIGTADERNLRPHAFYQVHRITGKMVATASYEAVVSGTKVLEMTLLPENNMAANIDCAGILKLRNSDIELRKGETDIGRKNTRVRLVFRVHVPQGGGKVVSVQAASVPIECSQRSAQELPQVEAYSPSACSVRGGEELVLTGSNFLPDSKVVFIERGPDGKLQWEEEATVNRLQSNEVTLTLTVPEYSNKRVSRPVQVYFYVSNGRRKRSPTQSFRFLPVICKEEPLPDSSLRGFPSASATPFGTDMDFSPPRPPYPSYPHEDPACETPYLSEGFGYGMPPLYPQTGPPPSYRPGLRMFPETRGTTGCAQPPAVSFLPRPFPSDPYGGRGSSFSLGLPFSPPAPFRPPPLPASPPLEGPFPSQSDVHPLPAEGYNKVGPGYGPGEGAPEQEKSRGGYSSGFRDSVPIQGITLEEVSEIIGRDLSGFPAPPGEEPPA

SEQ ID NO: 164 - protein, 933 aa, Homo sapiens
MADGGADSAAQRLPEGPGRVAPGRDLGAPAGSMGAASCEDEELEFKLVFGEEKEAPPLGAGGLGEELDSEDAPPCCRLALGEPPPYGAAPIGIPRPPPPRPGMHSPPPRPAPSPGTWESQPARSVRLGGPGGGAGGAGGGRVLECPSIRITSISPTPEPPAALEDNPDAWGDGSPRDYPPPEGFGGYREAGGQGGGAFFSPSPGSSSLSSWSFFSDASDEAALYAACDEVESELNEAASRFGLGSPLPSPRASPRPWTPEDPWSLYGPSPGGRGPEDSWLLLSAPGPTPASPRPASPCGKRRYSSSGTPSSASPALSRRGSLGEEGSEPPPPPPLPLARDPGSPGPFDYVGAPPAESIPQKTRRTSSEQAVALPRSEEPASCNGKLPLGAEESVAPPGGSRKEVAGMDYLAVPSPLAWSKARIGGHSPIFRTSALPPLDWPLPSQYEQLELRIEVQPRAHHRAHYETEGSRGAVKAAPGGHPVVKLLGYSEKPLTLQMFIGTADERNLRPHAFYQVHRITGKMVATASYEAVVSGTKVLEMTLLPENNMAANIDCAGILKLRNSDIELRKGETDIGRKNTRVRLVFRVHVPQGGGKVVSVQAASVPIECSQRSAQELPQVEAYSPSACSVRGGEELVLTGSNFLPDSKVVFIERGPDGKLQWEEEATVNRLQSNEVTLTLTVPEYSNKRVSRPVQVYFYVSNGRRKRSPTQSFRFLPVICKEEPLPDSSLRGFPSASATPFGTDMDFSPPRPPYPSYPHEDPACETPYLSEGFGYGMPPLYPQTGPPPSYRPGLRMFPETRGTTGCAQPPAVSFLPRPFPSDPYGGRGSSFSLGLPFSPPAPFRPPPLPASPPLEGPFPSQSDVHPLPAEGYNKVGPGYGPGEGAPEQEKSRGGYSSGFRDSVPIQGITLEEGGCGTGGCECECVQEIALHVC

SEQ ID NO: 165 - protein, 915 aa, Homo sapiens
MLSGRDLGAPAGSMGAASCEDEELEFKLVFGEEKEAPPLGAGGLGEELDSEDAPPCCRLALGEPPPYGAAPIGIPRPPPPRPGMHSPPPRPAPSPGTWESQPARSVRLGGPGGGAGGAGGGRVLECPSIRITSISPTPEPPAALEDNPDAWGDGSPRDYPPPEGFGGYREAGGQGGGAFFSPSPGSSSLSSWSFFSDASDEAALYAACDEVESELNEAASRFGLGSPLPSPRASPRPWTPEDPWSLYGPSPGGRGPEDSWLLLSAPGPTPASPRPASPCGKRRYSSSGTPSSASPALSRRGSLGEEGSEPPPPPPLPLARDPGSPGPFDYVGAPPAESIPQKTRRTSSEQAVALPRSEEPASCNGKLPLGAEESVAPPGGSRKEVAGMDYLAVPSPLAWSKARIGGHSPIFRTSALPPLDWPLPSQYEQLELRIEVQPRAHHRAHYETEGSRGAVKAAPGGHPVVKLLGYSEKPLTLQMFIGTADERNLRPHAFYQVHRITGKMVATASYEAVVSGTKVLEMTLLPENNMAANIDCAGILKLRNSDIELRKGETDIGRKNTRVRLVFRVHVPQGGGKVVSVQAASVPIECSQRSAQELPQVEAYSPSACSVRGGEELVLTGSNFLPDSKVVFIERGPDGKLQWEEEATVNRLQSNEVTLTLTVPEYSNKRVSRPVQVYFYVSNGRRKRSPTQSFRFLPVICKEEPLPDSSLRGFPSASATPFGTDMDFSPPRPPYPSYPHEDPACETPYLSEGFGYGMPPLYPQTGPPPSYRPGLRMFPETRGTTGCAQPPAVSFLPRPFPSDPYGGRGSSFSLGLPFSPPAPFRPPPLPASPPLEGPFPSQSDVHPLPAEGYNKVGPGYGPGEGAPEQEKSRGGYSSGFRDSVPIQGITLEEVSEIIGRDLSGFPAPPGEEPPA

SEQ ID NO: 166 - protein, 914 aa, Homo sapiens
MLSGRDLGAPAGSMGAASCEDEELEFKLVFGEEKEAPPLGAGGLGEELDSEDAPPCCRLALGEPPPYGAAPIGIPRPPPPRPGMHSPPPRPAPSPGTWESQPARSVRLGGPGGGAGGAGGGRVLECPSIRITSISPTPEPPAALEDNPDAWGDGSPRDYPPPEGFGGYREAGGQGGGAFFSPSPGSSSLSSWSFFSDASDEAALYAACDEVESELNEAASRFGLGSPLPSPRASPRPWTPEDPWSLYGPSPGGRGPEDSWLLLSAPGPTPASPRPASPCGKRRYSSSGTPSSASPALSRRGSLGEEGSEPPPPPPLPLARDPGSPGPFDYVGAPPAESIPQKTRRTSSEQAVALPRSEEPASCNGKLPLGAEESVAPPGGSRKEVAGMDYLAVPSPLAWSKARIGGHSPIFRTSALPPLDWPLPSQYEQLELRIEVQPRAHHRAHYETEGSRGAVKAAPGGHPVVKLLGYSEKPLTLQMFIGTADERNLRPHAFYQVHRITGKMVATASYEAVVSGTKVLEMTLLPENNMAANIDCAGILKLRNSDIELRKGETDIGRKNTRVRLVFRVHVPQGGGKVVSVQAASVPIECSQRSAQELPQVEAYSPSACSVRGGEELVLTGSNFLPDSKVVFIERGPDGKLQWEEEATVNRLQSNEVTLTLTVPEYSNKRVSRPVQVYFYVSNGRRKRSPTQSFRFLPVICKEEPLPDSSLRGFPSASATPFGTDMDFSPPRPPYPSYPHEDPACETPYLSEGFGYGMPPLYPQTGPPPSYRPGLRMFPETRGTTGCAQPPAVSFLPRPFPSDPYGGRGSSFSLGLPFSPPAPFRPPPLPASPPLEGPFPSQSDVHPLPAEGYNKVGPGYGPGEGAPEQEKSRGGYSSGFRDSVPIQGITLEEGGCGTGGCECECVQEIALHVC

SEQ ID NO: 167 - protein, 901 aa, Homo sapiens
MGAASCEDEELEFKLVFGEEKEAPPLGAGGLGEELDSEDAPPCCRLALGEPPPYGAAPIGIPRPPPPRPGMHSPPPRPAPSPGTWESQPARSVRLGGPGGGAGGAGGGRVLECPSIRITSISPTPEPPAALEDNPDAWGDGSPRDYPPPEGFGGYREAGGQGGGAFFSPSPGSSSLSSWSFFSDASDEAALYAACDEVESELNEAASRFGLGSPLPSPRASPRPWTPEDPWSLYGPSPGGRGPEDSWLLLSAPGPTPASPRPASPCGKRRYSSSGTPSSASPALSRRGSLGEEGSEPPPPPPLPLARDPGSPGPFDYVGAPPAESIPQKTRRTSSEQAVALPRSEEPASCNGKLPLGAEESVAPPGGSRKEVAGMDYLAVPSPLAWSKARIGGHSPIFRTSALPPLDWPLPSQYEQLELRIEVQPRAHHRAHYETEGSRGAVKAAPGGHPVVKLLGYSEKPLTLQMFIGTADERNLRPHAFYQVHRITGKMVATASYEAVVSGTKVLEMTLLPENNMAANIDCAGILKLRNSDIELRKGETDIGRKNTRVRLVFRVHVPQGGGKVVSVQAASVPIECSQRSAQELPQVEAYSPSACSVRGGEELVLTGSNFLPDSKVVFIERGPDGKLQWEEEATVNRLQSNEVTLTLTVPEYSNKRVSRPVQVYFYVSNGRRKRSPTQSFRFLPVICKEEPLPDSSLRGFPSASATPFGTDMDFSPPRPPYPSYPHEDPACETPYLSEGFGYGMPPLYPQTGPPPSYRPGLRMFPETRGTTGCAQPPAVSFLPRPFPSDPYGGRGSSFSLGLPFSPPAPFRPPPLPASPPLEGPFPSQSDVHPLPAEGYNKVGPGYGPGEGAPEQEKSRGGYSSGFRDSVPIQGITLEEGGCGTGGCECECVQEIALHVC

SEQ ID NO: 168 - protein, 890 aa, Homo sapiens
MPASISSIFPGPTLLLSCGSEELDSEDAPPCCRLALGEPPPYGAAPIGIPRPPPPRPGMHSPPPRPAPSPGTWESQPARSVRLGGPGGGAGGAGGGRVLECPSIRITSISPTPEPPAALEDNPDAWGDGSPRDYPPPEGFGGYREAGGQGGGAFFSPSPGSSSLSSWSFFSDASDEAALYAACDEVESELNEAASRFGLGSPLPSPRASPRPWTPEDPWSLYGPSPGGRGPEDSWLLLSAPGPTPASPRPASPCGKRRYSSSGTPSSASPALSRRGSLGEEGSEPPPPPPLPLARDPGSPGPFDYVGAPPAESIPQKTRRTSSEQAVALPRSEEPASCNGKLPLGAEESVAPPGGSRKEVAGMDYLAVPSPLAWSKARIGGHSPIFRTSALPPLDWPLPSQYEQLELRIEVQPRAHHRAHYETEGSRGAVKAAPGGHPVVKLLGYSEKPLTLQMFIGTADERNLRPHAFYQVHRITGKMVATASYEAVVSGTKVLEMTLLPENNMAANIDCAGILKLRNSDIELRKGETDIGRKNTRVRLVFRVHVPQGGGKVVSVQAASVPIECSQRSAQELPQVEAYSPSACSVRGGEELVLTGSNFLPDSKVVFIERGPDGKLQWEEEATVNRLQSNEVTLTLTVPEYSNKRVSRPVQVYFYVSNGRRKRSPTQSFRFLPVICKEEPLPDSSLRGFPSASATPFGTDMDFSPPRPPYPSYPHEDPACETPYLSEGFGYGMPPLYPQTGPPPSYRPGLRMFPETRGTTGCAQPPAVSFLPRPFPSDPYGGRGSSFSLGLPFSPPAPFRPPPLPASPPLEGPFPSQSDVHPLPAEGYNKVGPGYGPGEGAPEQEKSRGGYSSGFRDSVPIQGITLEEVSEIIGRDLSGFPAPPGEEPPA

SEQ ID NO: 169 - protein, 889 aa, Homo sapiens
MPASISSIFPGPTLLLSCGSEELDSEDAPPCCRLALGEPPPYGAAPIGIPRPPPPRPGMHSPPPRPAPSPGTWESQPARSVRLGGPGGGAGGAGGGRVLECPSIRITSISPTPEPPAALEDNPDAWGDGSPRDYPPPEGFGGYREAGGQGGGAFFSPSPGSSSLSSWSFFSDASDEAALYAACDEVESELNEAASRFGLGSPLPSPRASPRPWTPEDPWSLYGPSPGGRGPEDSWLLLSAPGPTPASPRPASPCGKRRYSSSGTPSSASPALSRRGSLGEEGSEPPPPPPLPLARDPGSPGPFDYVGAPPAESIPQKTRRTSSEQAVALPRSEEPASCNGKLPLGAEESVAPPGGSRKEVAGMDYLAVPSPLAWSKARIGGHSPIFRTSALPPLDWPLPSQYEQLELRIEVQPRAHHRAHYETEGSRGAVKAAPGGHPVVKLLGYSEKPLTLQMFIGTADERNLRPHAFYQVHRITGKMVATASYEAVVSGTKVLEMTLLPENNMAANIDCAGILKLRNSDIELRKGETDIGRKNTRVRLVFRVHVPQGGGKVVSVQAASVPIECSQRSAQELPQVEAYSPSACSVRGGEELVLTGSNFLPDSKVVFIERGPDGKLQWEEEATVNRLQSNEVTLTLTVPEYSNKRVSRPVQVYFYVSNGRRKRSPTQSFRFLPVICKEEPLPDSSLRGFPSASATPFGTDMDFSPPRPPYPSYPHEDPACETPYLSEGFGYGMPPLYPQTGPPPSYRPGLRMFPETRGTTGCAQPPAVSFLPRPFPSDPYGGRGSSFSLGLPFSPPAPFRPPPLPASPPLEGPFPSQSDVHPLPAEGYNKVGPGYGPGEGAPEQEKSRGGYSSGFRDSVPIQGITLEEGGCGTGGCECECVQEIALHVC

SEQ ID NO: 170 - protein, 857 aa, Homo sapiens
MITTLPSLLPASLASISHRVTNLPSNSLSHNPGLSKPDFPGNSSPGLPSSSSPGRDLGAPAGSMGAASCEDEELEFKLVFGEEKEAPPLGAGGLGEELDSEDAPPCCRLALGEPPPYGAAPIGIPRPPPPRPGMHSPPPRPAPSPGTWESQPARSVRLGGPGGGAGGAGGGRVLECPSIRITSISPTPEPPAALEDNPDAWGDGSPRDYPPPEGFGGYREAGGQGGGAFFSPSPGSSSLSSWSFFSDASDEAALYAACDEVESELNEAASRFGLGSPLPSPRASPRPWTPEDPWSLYGPSPGGRGPEDSWLLLSAPGPTPASPRPASPCGKRRYSSSGTPSSASPALSRRGSLGEEGSEPPPPPPLPLARDPGSPGPFDYVGAPPAESIPQKTRRTSSEQAVALPRSEEPASCNGKLPLGAEESVAPPGGSRKEVAGMDYLAVPSPLAWSKARIGGHSPIFRTSALPPLDWPLPSQYEQLELRIEVQPRAHHRAHYETEGSRGAVKAAPGGHPVVKLLGYSEKPLTLQMFIGTADERNLRPHAFYQVHRITGKMVATASYEAVVSGTKVLEMTLLPENNMAANIDCAGILKLRNSDIELRKGETDIGRKNTRVRLVFRVHVPQGGGKVVSVQAASVPIECSQRSAQELPQVEAYSPSACSVRGGEELVLTGSNFLPDSKVVFIERGPDGKLQWEEEATVNRLQSNEVTLTLTVPEYSNKRVSRPVQVYFYVSNGRRKRSPTQSFRFLPVICKEEPLPDSSLRGFPSASATPFGTDMDFSPPRPPYPSYPHEDPACETPYLSEGFGYGMPPLYPQTGPPPSYRPGLRMFPETRGTTVSEIIGRDLSGFPAPPGEEPPA

SEQ ID NO: 171 - protein, 832 aa, Homo sapiens
MHSPPPRPAPSPGTWESQPARSVRLGGPGGGAGGAGGGRVLECPSIRITSISPTPEPPAALEDNPDAWGDGSPRDYPPPEGFGGYREAGGQGGGAFFSPSPGSSSLSSWSFFSDASDEAALYAACDEVESELNEAASRFGLGSPLPSPRASPRPWTPEDPWSLYGPSPGGRGPEDSWLLLSAPGPTPASPRPASPCGKRRYSSSGTPSSASPALSRRGSLGEEGSEPPPPPPLPLARDPGSPGPFDYVGAPPAESIPQKTRRTSSEQAVALPRSEEPASCNGKLPLGAEESVAPPGGSRKEVAGMDYLAVPSPLAWSKARIGGHSPIFRTSALPPLDWPLPSQYEQLELRIEVQPRAHHRAHYETEGSRGAVKAAPGGHPVVKLLGYSEKPLTLQMFIGTADERNLRPHAFYQVHRITGKMVATASYEAVVSGTKVLEMTLLPENNMAANIDCAGILKLRNSDIELRKGETDIGRKNTRVRLVFRVHVPQGGGKVVSVQAASVPIECSQRSAQELPQVEAYSPSACSVRGGEELVLTGSNFLPDSKVVFIERGPDGKLQWEEEATVNRLQSNEVTLTLTVPEYSNKRVSRPVQVYFYVSNGRRKRSPTQSFRFLPVICKEEPLPDSSLRGFPSASATPFGTDMDFSPPRPPYPSYPHEDPACETPYLSEGFGYGMPPLYPQTGPPPSYRPGLRMFPETRGTTGCAQPPAVSFLPRPFPSDPYGGRGSSFSLGLPFSPPAPFRPPPLPASPPLEGPFPSQSDVHPLPAEGYNKVGPGYGPGEGAPEQEKSRGGYSSGFRDSVPIQGITLEEVSEIIGRDLSGFPAPPGEEPPA

SEQ ID NO: 172 - protein, 831 aa, Homo sapiens
MHSPPPRPAPSPGTWESQPARSVRLGGPGGGAGGAGGGRVLECPSIRITSISPTPEPPAALEDNPDAWGDGSPRDYPPPEGFGGYREAGGQGGGAFFSPSPGSSSLSSWSFFSDASDEAALYAACDEVESELNEAASRFGLGSPLPSPRASPRPWTPEDPWSLYGPSPGGRGPEDSWLLLSAPGPTPASPRPASPCGKRRYSSSGTPSSASPALSRRGSLGEEGSEPPPPPPLPLARDPGSPGPFDYVGAPPAESIPQKTRRTSSEQAVALPRSEEPASCNGKLPLGAEESVAPPGGSRKEVAGMDYLAVPSPLAWSKARIGGHSPIFRTSALPPLDWPLPSQYEQLELRIEVQPRAHHRAHYETEGSRGAVKAAPGGHPVVKLLGYSEKPLTLQMFIGTADERNLRPHAFYQVHRITGKMVATASYEAVVSGTKVLEMTLLPENNMAANIDCAGILKLRNSDIELRKGETDIGRKNTRVRLVFRVHVPQGGGKVVSVQAASVPIECSQRSAQELPQVEAYSPSACSVRGGEELVLTGSNFLPDSKVVFIERGPDGKLQWEEEATVNRLQSNEVTLTLTVPEYSNKRVSRPVQVYFYVSNGRRKRSPTQSFRFLPVICKEEPLPDSSLRGFPSASATPFGTDMDFSPPRPPYPSYPHEDPACETPYLSEGFGYGMPPLYPQTGPPPSYRPGLRMFPETRGTTGCAQPPAVSFLPRPFPSDPYGGRGSSFSLGLPFSPPAPFRPPPLPASPPLEGPFPSQSDVHPLPAEGYNKVGPGYGPGEGAPEQEKSRGGYSSGFRDSVPIQGITLEEGGCGTGGCECECVQEIALHVC

SEQ ID NO: 173 - protein, 826 aa, Homo sapiens
MADGGADSAAQRLPEGPGRVAPGRDLGAPAGSMGAASCEDEELEFKLVFGEEKEAPPLGAGGLGEELDSEDAPPCCRLALGEPPPYGAAPIGIPRPPPPRPGMHSPPPRPAPSPGTWESQPARSVRLGGPGGGAGGAGGGRVLECPSIRITSISPTPEPPAALEDNPDAWGDGSPRDYPPPEGFGGYREAGGQGGGAFFSPSPGSSSLSSWSFFSDASDEAALYAACDEVESELNEAASRFGLGSPLPSPRASPRPWTPEDPWSLYGPSPGGRGPEDSWLLLSAPGPTPASPRPASPCGKRRYSSSGTPSSASPALSRRGSLGEEGSEPPPPPPLPLARDPGSPGPFDYVGAPPAESIPQKTRRTSSEQAVALPRSEEPASCNGKLPLGAEESVAPPGGSRKEVAGMDYLAVPSPLAWSKARIGGHSPIFRTSALPPLDWPLPSQYEQLELRIEVQPRAHHRAHYETEGSRGAVKAAPGGHPVVKLLGYSEKPLTLQMFIGTADERNLRPHAFYQVHRITGKMVATASYEAVVSGTKVLEMTLLPENNMAANIDCAGILKLRNSDIELRKGETDIGRKNTRVRLVFRVHVPQGGGKVVSVQAASVPIECSQRSAQELPQVEAYSPSACSVRGGEELVLTGSNFLPDSKVVFIERGPDGKLQWEEEATVNRLQSNEVTLTLTVPEYSNKRVSRPVQVYFYVSNGRRKRSPTQSFRFLPVICKEEPLPDSSLRGFPSASATPFGTDMDFSPPRPPYPSYPHEDPACETPYLSEGFGYGMPPLYPQTGPPPSYRPGLRMFPETRGTTVSEIIGRDLSGFPAPPGEEPPA

SEQ ID NO: 174 - protein, 807 aa, Homo sapiens
MLSGRDLGAPAGSMGAASCEDEELEFKLVFGEEKEAPPLGAGGLGEELDSEDAPPCCRLALGEPPPYGAAPIGIPRPPPPRPGMHSPPPRPAPSPGTWESQPARSVRLGGPGGGAGGAGGGRVLECPSIRITSISPTPEPPAALEDNPDAWGDGSPRDYPPPEGFGGYREAGGQGGGAFFSPSPGSSSLSSWSFFSDASDEAALYAACDEVESELNEAASRFGLGSPLPSPRASPRPWTPEDPWSLYGPSPGGRGPEDSWLLLSAPGPTPASPRPASPCGKRRYSSSGTPSSASPALSRRGSLGEEGSEPPPPPPLPLARDPGSPGPFDYVGAPPAESIPQKTRRTSSEQAVALPRSEEPASCNGKLPLGAEESVAPPGGSRKEVAGMDYLAVPSPLAWSKARIGGHSPIFRTSALPPLDWPLPSQYEQLELRIEVQPRAHHRAHYETEGSRGAVKAAPGGHPVVKLLGYSEKPLTLQMFIGTADERNLRPHAFYQVHRITGKMVATASYEAVVSGTKVLEMTLLPENNMAANIDCAGILKLRNSDIELRKGETDIGRKNTRVRLVFRVHVPQGGGKVVSVQAASVPIECSQRSAQELPQVEAYSPSACSVRGGEELVLTGSNFLPDSKVVFIERGPDGKLQWEEEATVNRLQSNEVTLTLTVPEYSNKRVSRPVQVYFYVSNGRRKRSPTQSFRFLPVICKEEPLPDSSLRGFPSASATPFGTDMDFSPPRPPYPSYPHEDPACETPYLSEGFGYGMPPLYPQTGPPPSYRPGLRMFPETRGTTVSEIIGRDLSGFPAPPGEEPPA

SEQ ID NO: 175 - protein, 794 aa, Homo sapiens
MGAASCEDEELEFKLVFGEEKEAPPLGAGGLGEELDSEDAPPCCRLALGEPPPYGAAPIGIPRPPPPRPGMHSPPPRPAPSPGTWESQPARSVRLGGPGGGAGGAGGGRVLECPSIRITSISPTPEPPAALEDNPDAWGDGSPRDYPPPEGFGGYREAGGQGGGAFFSPSPGSSSLSSWSFFSDASDEAALYAACDEVESELNEAASRFGLGSPLPSPRASPRPWTPEDPWSLYGPSPGGRGPEDSWLLLSAPGPTPASPRPASPCGKRRYSSSGTPSSASPALSRRGSLGEEGSEPPPPPPLPLARDPGSPGPFDYVGAPPAESIPQKTRRTSSEQAVALPRSEEPASCNGKLPLGAEESVAPPGGSRKEVAGMDYLAVPSPLAWSKARIGGHSPIFRTSALPPLDWPLPSQYEQLELRIEVQPRAHHRAHYETEGSRGAVKAAPGGHPVVKLLGYSEKPLTLQMFIGTADERNLRPHAFYQVHRITGKMVATASYEAVVSGTKVLEMTLLPENNMAANIDCAGILKLRNSDIELRKGETDIGRKNTRVRLVFRVHVPQGGGKVVSVQAASVPIECSQRSAQELPQVEAYSPSACSVRGGEELVLTGSNFLPDSKVVFIERGPDGKLQWEEEATVNRLQSNEVTLTLTVPEYSNKRVSRPVQVYFYVSNGRRKRSPTQSFRFLPVICKEEPLPDSSLRGFPSASATPFGTDMDFSPPRPPYPSYPHEDPACETPYLSEGFGYGMPPLYPQTGPPPSYRPGLRMFPETRGTTVSEIIGRDLSGFPAPPGEEPPA

SEQ ID NO: 176 - protein, 782 aa, Homo sapiens
MPASISSIFPGPTLLLSCGSEELDSEDAPPCCRLALGEPPPYGAAPIGIPRPPPPRPGMHSPPPRPAPSPGTWESQPARSVRLGGPGGGAGGAGGGRVLECPSIRITSISPTPEPPAALEDNPDAWGDGSPRDYPPPEGFGGYREAGGQGGGAFFSPSPGSSSLSSWSFFSDASDEAALYAACDEVESELNEAASRFGLGSPLPSPRASPRPWTPEDPWSLYGPSPGGRGPEDSWLLLSAPGPTPASPRPASPCGKRRYSSSGTPSSASPALSRRGSLGEEGSEPPPPPPLPLARDPGSPGPFDYVGAPPAESIPQKTRRTSSEQAVALPRSEEPASCNGKLPLGAEESVAPPGGSRKEVAGMDYLAVPSPLAWSKARIGGHSPIFRTSALPPLDWPLPSQYEQLELRIEVQPRAHHRAHYETEGSRGAVKAAPGGHPVVKLLGYSEKPLTLQMFIGTADERNLRPHAFYQVHRITGKMVATASYEAVVSGTKVLEMTLLPENNMAANIDCAGILKLRNSDIELRKGETDIGRKNTRVRLVFRVHVPQGGGKVVSVQAASVPIECSQRSAQELPQVEAYSPSACSVRGGEELVLTGSNFLPDSKVVFIERGPDGKLQWEEEATVNRLQSNEVTLTLTVPEYSNKRVSRPVQVYFYVSNGRRKRSPTQSFRFLPVICKEEPLPDSSLRGFPSASATPFGTDMDFSPPRPPYPSYPHEDPACETPYLSEGFGYGMPPLYPQTGPPPSYRPGLRMFPETRGTTVSEIIGRDLSGFPAPPGEEPPA

SEQ ID NO: 177 - protein, 724 aa, Homo sapiens
MHSPPPRPAPSPGTWESQPARSVRLGGPGGGAGGAGGGRVLECPSIRITSISPTPEPPAALEDNPDAWGDGSPRDYPPPEGFGGYREAGGQGGGAFFSPSPGSSSLSSWSFFSDASDEAALYAACDEVESELNEAASRFGLGSPLPSPRASPRPWTPEDPWSLYGPSPGGRGPEDSWLLLSAPGPTPASPRPASPCGKRRYSSSGTPSSASPALSRRGSLGEEGSEPPPPPPLPLARDPGSPGPFDYVGAPPAESIPQKTRRTSSEQAVALPRSEEPASCNGKLPLGAEESVAPPGGSRKEVAGMDYLAVPSPLAWSKARIGGHSPIFRTSALPPLDWPLPSQYEQLELRIEVQPRAHHRAHYETEGSRGAVKAAPGGHPVVKLLGYSEKPLTLQMFIGTADERNLRPHAFYQVHRITGKMVATASYEAVVSGTKVLEMTLLPENNMAANIDCAGILKLRNSDIELRKGETDIGRKNTRVRLVFRVHVPQGGGKVVSVQAASVPIECSQRSAQELPQVEAYSPSACSVRGGEELVLTGSNFLPDSKVVFIERGPDGKLQWEEEATVNRLQSNEVTLTLTVPEYSNKRVSRPVQVYFYVSNGRRKRSPTQSFRFLPVICKEEPLPDSSLRGFPSASATPFGTDMDFSPPRPPYPSYPHEDPACETPYLSEGFGYGMPPLYPQTGPPPSYRPGLRMFPETRGTTVSEIIGRDLSGFPAPPGEEPPA

SEQ ID NO: 178 - protein, 437 aa, Homo sapiens
MFIGTADERNLRPHAFYQVHRITGKMVATASYEAVVSGTKVLEMTLLPENNMAANIDCAGILKLRNSDIELRKGETDIGRKNTRVRLVFRVHVPQGGGKVVSVQAASVPIECSQRSAQELPQVEAYSPSACSVRGGEELVLTGSNFLPDSKVVFIERGPDGKLQWEEEATVNRLQSNEVTLTLTVPEYSNKRVSRPVQVYFYVSNGRRKRSPTQSFRFLPVICKEEPLPDSSLRGFPSASATPFGTDMDFSPPRPPYPSYPHEDPACETPYLSEGFGYGMPPLYPQTGPPPSYRPGLRMFPETRGTTGCAQPPAVSFLPRPFPSDPYGGRGSSFSLGLPFSPPAPFRPPPLPASPPLEGPFPSQSDVHPLPAEGYNKVGPGYGPGEGAPEQEKSRGGYSSGFRDSVPIQGITLEEVSEIIGRDLSGFPAPPGEEPPA

SEQ ID NO: 179 - protein, 436 aa, Homo sapiens
MFIGTADERNLRPHAFYQVHRITGKMVATASYEAVVSGTKVLEMTLLPENNMAANIDCAGILKLRNSDIELRKGETDIGRKNTRVRLVFRVHVPQGGGKVVSVQAASVPIECSQRSAQELPQVEAYSPSACSVRGGEELVLTGSNFLPDSKVVFIERGPDGKLQWEEEATVNRLQSNEVTLTLTVPEYSNKRVSRPVQVYFYVSNGRRKRSPTQSFRFLPVICKEEPLPDSSLRGFPSASATPFGTDMDFSPPRPPYPSYPHEDPACETPYLSEGFGYGMPPLYPQTGPPPSYRPGLRMFPETRGTTGCAQPPAVSFLPRPFPSDPYGGRGSSFSLGLPFSPPAPFRPPPLPASPPLEGPFPSQSDVHPLPAEGYNKVGPGYGPGEGAPEQEKSRGGYSSGFRDSVPIQGITLEEGGCGTGGCECECVQEIALHVC

SEQ ID NO: 180 - protein, 329 aa, Homo sapiens
MFIGTADERNLRPHAFYQVHRITGKMVATASYEAVVSGTKVLEMTLLPENNMAANIDCAGILKLRNSDIELRKGETDIGRKNTRVRLVFRVHVPQGGGKVVSVQAASVPIECSQRSAQELPQVEAYSPSACSVRGGEELVLTGSNFLPDSKVVFIERGPDGKLQWEEEATVNRLQSNEVTLTLTVPEYSNKRVSRPVQVYFYVSNGRRKRSPTQSFRFLPVICKEEPLPDSSLRGFPSASATPFGTDMDFSPPRPPYPSYPHEDPACETPYLSEGFGYGMPPLYPQTGPPPSYRPGLRMFPETRGTTVSEIIGRDLSGFPAPPGEEPPA

SEQ ID NO: 181 - protein, 190 aa, Homo sapiens
MDFSPPRPPYPSYPHEDPACETPYLSEGFGYGMPPLYPQTGPPPSYRPGLRMFPETRGTTGCAQPPAVSFLPRPFPSDPYGGRGSSFSLGLPFSPPAPFRPPPLPASPPLEGPFPSQSDVHPLPAEGYNKVGPGYGPGEGAPEQEKSRGGYSSGFRDSVPIQGITLEEVSEIIGRDLSGFPAPPGEEPPA

SEQ ID NO: 182 - protein, 189 aa, Homo sapiens
MDFSPPRPPYPSYPHEDPACETPYLSEGFGYGMPPLYPQTGPPPSYRPGLRMFPETRGTTGCAQPPAVSFLPRPFPSDPYGGRGSSFSLGLPFSPPAPFRPPPLPASPPLEGPFPSQSDVHPLPAEGYNKVGPGYGPGEGAPEQEKSRGGYSSGFRDSVPIQGITLEEGGCGTGGCECECVQEIALHVC

SEQ ID NO: 183 - protein, 82 aa, Homo sapiens
MDFSPPRPPYPSYPHEDPACETPYLSEGFGYGMPPLYPQTGPPPSYRPGLRMFPETRGTTVSEIIGRDLSGFPAPPGEEPPA

SEQ ID NO: 184 - protein, 390 aa, Homo sapiens
MPPSGLRLLLLLLPLLWLLVLTPGRPAAGLSTCKTIDMELVKRKRIEAIRGQILSKLRLASPPSQGEVPPGPLPEAVLALYNSTRDRVAGESAEPEPEPEADYYAKEVTRVLMVETHNEIYDKFKQSTHSIYMFFNTSELREAVPEPVLLSRAELRLLRLKLKVEQHVELYQKYSNNSWRYLSNRLLAPSDSPEWLSFDVTGVVRQWLSRGGEIEGFRLSAHCSCDSRDNTLQVDINGFTTGRRGDLATIHGMNRPFLLLMATPLERAQHLQSSRHRRALDTNYCFSSTEKNCCVRQLYIDFRKDLGWKWIHEPKGYHANFCLGPCPYIWSLDTQYSKVLALYNQHNPGASAAPCCVPQALEPLPIVYYVGRKPKVEQLSNMIVRSCKCS

SEQ ID NO: 185 - protein, 396 aa, Homo sapiens
MPRVKAAQAGRQSSAKRHLAEQFAVGEIITDMAKKEWKVGLPIGQGGFGCIYLADMNSSESVGSDAPCVVKVEPSDNGPLFTELKFYQRAAKPEQIQKWIRTRKLKYLGVPKYWGSGLHDKNGKSYRFMIMDRFGSDLQKIYEANAKRFSRKTVLQLSLRILDILEYIHEHEYVHGDIKASNLLLNYKNPDQVYLVDYGLAYRYCPEGVHKEYKEDPKRCHDGTIEFTSIDAHNGVAPSRRGDLEILGYCMIQWLTGHLPWEDNLKDPKYVRDSKIRYRENIASLMDKCFPEKNKPGEIAKYMETVKLLDYTEKPLYENLRDILLQGLKAIGSKDDGKLDLSVVENGGLKAKTITKKRKKEIEESKEPGVEDTEWSNTQTEEAIQTRSRTRKRVQK

SEQ ID NO: 186 - protein, 212 aa, Homo sapiens
MKPPSSIQTSEFDSSDEEPIEDEQTPIHISWLSLSRVNCSQFLGLCALPGCKFKDVRRNVQKDTEELKSCGIQDIFVFCTRGELSKYRVPNLLDLYQQCGIITHHHPIADGGTPDIASCCEIMEELTTCLKNYRKTLIHCYGGLGRSCLVAACLLLYLSDTISPEQAIDSLRDLRGSGAIQTIKQYNYLHEFRDKLAAHLSSRDSQSRSVSR

SEQ ID NO: 187 - protein, 172 aa, Homo sapiens
MKPPSSIQTSCKFKDVRRNVQKDTEELKSCGIQDIFVFCTRGELSKYRVPNLLDLYQQCGIITHHHPIADGGTPDIASCCEIMEELTTCLKNYRKTLIHCYGGLGRSCLVAACLLLYLSDTISPEQAIDSLRDLRGSGAIQTIKQYNYLHEFRDKLAAHLSSRDSQSRSVSR

SEQ ID NO: 188 - protein, 235 aa, Homo sapiens
MDPARPLGLSILLLFLTEAALGDAAQEPTGNNAEICLLPLDYGPCRALLLRYYYDRYTQSCRQFLYGGCEGNANNFYTWEACDDACWRIEKVPKVCRLQVSVDDQCEGSTEKYFFNLSSMTCEKFFSGGCHRNRIENRFPDEATCMGFCAPKKIPSFCYSPKDEGLCSANVTRYYFNPRYRTCDAFTYTGCGGNDNNFVSREDCKRACAKALKKKKKMPKLRFASRIRKIRKKQF

SEQ ID NO: 189 - protein, 224 aa, Homo sapiens
MDPARPLGLSILLLFLTEAALGDAAQEPTDYGPCRALLLRYYYDRYTQSCRQFLYGGCEGNANNFYTWEACDDACWRIEKVPKVCRLQVSVDDQCEGSTEKYFFNLSSMTCEKFFSGGCHRNRIENRFPDEATCMGFCAPKKIPSFCYSPKDEGLCSANVTRYYFNPRYRTCDAFTYTGCGGNDNNFVSREDCKRACAKALKKKKKMPKLRFASRIRKIRKKQF

SEQ ID NO: 190 - protein, 125 aa, Homo sapiens
MPSEKTFKQRRTFEQRVEDVRLIREQHPTKIPVIIERYKGEKQLPVLDKTKFLVPDHVNMSELIKIIRRRLQLNANQAFFLLVNGHSMVSVSTPISEVYESEKDEDGFLYMVYASQETFGMKLSV

SEQ ID NO: 191 - protein, 403 aa, Homo sapiens [sequence omitted]

SEQ ID NO: 192 - protein, 576 aa, Homo sapiens
MERGGEAAAAAAAAAAAPGRGSESPVTISRAGNAGELVSPLLLPPTRRRRRRHIQGPGPVLNLPSAAAAPPVARAPEAAGGGSRSEDYSSSPHSAAAAARPLAAEEKQAQSLQPSSSRRSSHYPAAVQSQAAAERGASATAKSRAISILQKKPRHQQLLPSLSSFFFSHRLPDMTAIIKEIVSRNKRRYQEDGFDLDLTYIYPNIIAMGFPAERLEGVYRNNIDDVVRFLDSKHKNHYKIYNLCAERHYDTAKFNCRVAQYPFEDHNPPQLELIKPFCEDLDQWLSEDDNHVAAIHCKAGKGRTGVMICAYLLHRGKFLKAQEALDFYGEVRTRDKKGVTIPSQRRYVYYYSYLLKNHLDYRPVALLFHKMMFETIPMFSGGTCNPQFVVCQLKVKIYSSNSGPTRREDKFMYFEFPQPLPVCGDIKVEFFHKQNKMLKKDKMFHFWVNTFFIPGPEETSEKVENGSLCDQEIDSICSIERADNDKEYLVLTLTKNDLDKANKDKANRYFSPNFKVKLYFTKTVEEPSNPEASSSTSVTPDVSDNEPDHYRYSDTTDSDPENEPFDEDQHTQITKV

SEQ ID NO: 193 - protein, 175 aa, Homo sapiens
MTAIIKEIVSRNKRRYQEDGFDLDLTYIYPNIIAMGFPAERLEGVYRNNIDDVVSCAERHYDTAKFNCRVAQYPFEDHNPPQLELIKPFCEDLDQWLSEDDNHVAAIHCKAGKGRTGVMICAYLLHRGKFLKAQEALDFYGEVRTRDKKADPTGGIPDKGIIVIGDGSSMDVIAP

SEQ ID NO: 194 - protein, 99 aa, Homo sapiens
MTSKLAVALLAAFLISAALCEGAVLPRSAKELRCQCIKTYSKPFHPKFIKELRVIESGPHCANTEIIVKLSDGRELCLDPKENWVQRVVEKFLKRAENS

SEQ ID NO: 195 - protein, 986 aa, Homo sapiens
MSRIESLTRARIDRSRELASKTREKEKMKEAKDARYTNGHLFTTISVSGMTMCYACNKSITAKEALICPTCNVTIHNRCKDTLANCTKVKQKQQKAALLKNNTALQSVSLRSKTTIRERPSSAIYPSDSFRQSLLGSRRGRSSLSLAKSVSTTNIAGHFNDESPLGLRRILSQSTDSLNMRNRTLSVESLIDEAEVIYSELMSDFEMDEKDFAADSWSLAVDSSFLQQHKKEVMKQQDVIYELIQTELHHVRTLKIMTRLFRTGMLEELHLEPGVVQGLFPCVDELSDIHTRFLSQLLERRRQALCPGSTRNFVIHRLGDLLISQFSGPSAEQMCKTYSEFCSRHSKALKLYKELYARDKRFQQFIRKVTRPAVLKRHGVQECILLVTQRITKYPLLISRILQHSHGIEEERQDLTTALGLVKELLSNVDEGIYQLEKGARLQEIYNRMDPRAQTPVPGKGPFGREELLRRKLIHDGCLLWKTATGRFKDVLVLLMTDVLVFLQEKDQKYIFPTLDKPSVVSLQNLIVRDIANQEKGMFLISAAPPEMYEVHTASRDDRSTWIRVIQQSVRTCPSREDFPLIETEDEAYLRRIKMELQQKDRALVELLREKVGLFAEMTHFQAEEDGGSGMALPTLPRGLFRSESLESPRGERLLQDAIREVEGLKDLLVGPGVELLLTPREPALPLEPDSGGNTSPGVTANGEARTFNGSIELCRADSDSSQRDRNGNQLRSPQEEALQRLVNLYGLLHGLQAAVAQQDTLMEARFPEGPERREKLCRANSRDGEAGRAGAAPVAPEKQATELALLQRQHALLQEELRRCRRLGEERATEAGSLEARLRESEQARALLEREAEEARRQLAALGQTEPLPAEAPWARRPVDPRRRSLPAGDALYLSFNPPQPSRGTDRLDLPVTTRSVHRNFEDRERQELGSPEERLQDSSDPDTGSEEEGSSRLSPPHSPRDFTRMQDIPEETESRDGEAVASES

SEQ ID NO: 196 - protein, 985 aa, Homo sapiens
MSRIESLTRARIDRSRELASKTREKEKMKEAKDARYTNGHLFTTISVSGMTMCYACNKSITAKEALICPTCNVTIHNRCKDTLANCTKVKQKQQKAALLKNNTALQSVSLRSKTTIRERPSSAIYPSDSFRQSLLGSRRGRSSLSLAKSVSTTNIAGHFNDESPLGLRRILSQSTDSLNMRNRTLSVESLIDEEVIYSELMSDFEMDEKDFAADSWSLAVDSSFLQQHKKEVMKQQDVIYELIQTELHHVRTLKIMTRLFRTGMLEELHLEPGVVQGLFPCVDELSDIHTRFLSQLLERRRQALCPGSTRNFVIHRLGDLLISQFSGPSAEQMCKTYSEFCSRHSKALKLYKELYARDKRFQQFIRKVTRPAVLKRHGVQECILLVTQRITKYPLLISRILQHSHGIEEERQDLTTALGLVKELLSNVDEGIYQLEKGARLQEIYNRMDPRAQTPVPGKGPFGREELLRRKLIHDGCLLWKTATGRFKDVLVLLMTDVLVFLQEKDQKYIFPTLDKPSVVSLQNLIVRDIANQEKGMFLISAAPPEMYEVHTASRDDRSTWIRVIQQSVRTCPSREDFPLIETEDEAYLRRIKMELQQKDRALVELLREKVGLFAEMTHFQAEEDGGSGMALPTLPRGLFRSESLESPRGERLLQDAIREVEGLKDLLVGPGVELLLTPREPALPLEPDSGGNTSPGVTANGEARTFNGSIELCRADSDSSQRDRNGNQLRSPQEEALQRLVNLYGLLHGLQAAVAQQDTLMEARFPEGPERREKLCRANSRDGEAGRAGAAPVAPEKQATELALLQRQHALLQEELRRCRRLGEERATEAGSLEARLRESEQARALLEREAEEARRQLAALGQTEPLPAEAPWARRPVDPRRRSLPAGDALYLSFNPPQPSRGTDRLDLPVTTRSVHRNFEDRERQELGSPEERLQDSSDPDTGSEEEGSSRLSPPHSPRDFTRMQDIPEETESRDGEAVASES

SEQ ID NO: 197 - protein, 958 aa, Homo sapiens
MKEAKDARYTNGHLFTTISVSGMTMCYACNKSITAKEALICPTCNVTIHNRCKDTLANCTKVKQKQQKAALLKNNTALQSVSLRSKTTIRERPSSAIYPSDSFRQSLLGSRRGRSSLSLAKSVSTTNIAGHFNDESPLGLRRILSQSTDSLNMRNRTLSVESLIDEEVIYSELMSDFEMDEKDFAADSWSLAVDSSFLQQHKKEVMKQQDVIYELIQTELHHVRTLKIMTRLFRTGMLEELHLEPGVVQGLFPCVDELSDIHTRFLSQLLERRRQALCPGSTRNFVIHRLGDLLISQFSGPSAEQMCKTYSEFCSRHSKALKLYKELYARDKRFQQFIRKVTRPAVLKRHGVQECILLVTQRITKYPLLISRILQHSHGIEEERQDLTTALGLVKELLSNVDEGIYQLEKGARLQEIYNRMDPRAQTPVPGKGPFGREELLRRKLIHDGCLLWKTATGRFKDVLVLLMTDVLVFLQEKDQKYIFPTLDKPSVVSLQNLIVRDIANQEKGMFLISAAPPEMYEVHTASRDDRSTWIRVIQQSVRTCPSREDFPLIETEDEAYLRRIKMELQQKDRALVELLREKVGLFAEMTHFQAEEDGGSGMALPTLPRGLFRSESLESPRGERLLQDAIREVEGLKDLLVGPGVELLLTPREPALPLEPDSGGNTSPGVTANGEARTFNGSIELCRADSDSSQRDRNGNQLRSPQEEALQRLVNLYGLLHGLQAAVAQQDTLMEARFPEGPERREKLCRANSRDGEAGRAGAAPVAPEKQATELALLQRQHALLQEELRRCRRLGEERATEAGSLEARLRESEQARALLEREAEEARRQLAALGQTEPLPAEAPWARRPVDPRRRSLPAGDALYLSFNPPQPSRGTDRLDLPVTTRSVHRNFEDRERQELGSPEERLQDSSDPDTGSEEEGSSRLSPPHSPRDFTRMQDIPEETESRDGEAVASES

SEQ ID NO: 198 - protein, 480 aa, Homo sapiens
MSAEVIHQVEEALDTDEKEMLLFLCRDVAIDVVPPNVRDLLDILRERGKLSVGDLAELLYRVRRFDLLKRILKMDRKAVETHLLRNPHLVSDYRVLMAEIGEDLDKSDVSSLIFLMKDYMGRGKISKEKSFLDLVVELEKLNLVAPDQLDLLEKCLKNIHRIDLKTKIQKYKQSVQGAGTSYRNVLQAAIQKSLKDPSNNFRLHNGRSKEQRLKEQLGAQQEPVKKSIQESEAFLPQSIPEERYKMKSKPLGICLIIDCIGNETELLRDTFTSLGYEVQKFLHLSMHGISQILGQFACMPEHRDYDSFVCVLVSRGGSQSVYGVDQTHSGLPLHHIRRMFMGDSCPYLAGKPKMFFIQNYVVSEGQLEDSSLLEVDGPAMKNVEFKAQKRGLCTVHREADFFWSLCTADMSLLEQSHSSPSLYLQCLSQKLRQERKRPLLDLHIELNGYMYDWNSRVSAKEKYYVWLQHTLRKKLILSYT

SEQ ID NO: 199 - protein, 221 aa, Homo sapiens
MSAEVIHQVEEALDTDEKEMLLFLCRDVAIDVVPPNVRDLLDILRERGKLSVGDLAELLYRVRRFDLLKRILKMDRKAVETHLLRNPHLVSDYRVLMAEIGEDLDKSDVSSLIFLMKDYMGRGKISKEKSFLDLVVELEKLNLVAPDQLDLLEKCLKNIHRIDLKTKIQKYKQSVQGAGTSYRNVLQAAIQKSLKDPSNNFRMITPYAHCPDLKILGNCSM

SEQ ID NO: 200 - protein, 366 aa, Homo sapiens
MAEIGEDLDKSDVSSLIFLMKDYMGRGKISKEKSFLDLVVELEKLNLVAPDQLDLLEKCLKNIHRIDLKTKIQKYKQSVQGAGTSYRNVLQAAIQKSLKDPSNNFRLHNGRSKEQRLKEQLGAQQEPVKKSIQESEAFLPQSIPEERYKMKSKPLGICLIIDCIGNETELLRDTFTSLGYEVQKFLHLSMHGISQILGQFACMPEHRDYDSFVCVLVSRGGSQSVYGVDQTHSGLPLHHIRRMFMGDSCPYLAGKPKMFFIQNYVVSEGQLEDSSLLEVDGPAMKNVEFKAQKRGLCTVHREADFFWSLCTADMSLLEQSHSSPSLYLQCLSQKLRQERGTIPGSGITESKDMHFSSLGCILLDVL

SEQ ID NO: 201 - protein, 235 aa, Homo sapiens
MKSKPLGICLIIDCIGNETELLRDTFTSLGYEVQKFLHLSMHGISQILGQFACMPEHRDYDSFVCVLVSRGGSQSVYGVDQTHSGLPLHHIRRMFMGDSCPYLAGKPKMFFIQNYVVSEGQLEDSSLLEVDGPAMKNVEFKAQKRGLCTVHREADFFWSLCTADMSLLEQSHSSPSLYLQCLSQKLRQERKRPLLDLHIELNGYMYDWNSRVSAKEKYYVWLQHTLRKKLILSYT

SEQ ID NO: 202 - protein, 449 aa, Homo sapiens
MSAEVIHQVEEALDTDEKEMLLFLCRDVAIDVVPPNVRDLLDILRERGKLSVGDLAELLYRVRRFDLLKRILKMDRKAVETHLLRNPHLVSDYRVLMAEIGEDLDKSDVSSLIFLMKDYMGRGKISKEKSFLDLVVELEKLNLVAPDQLDLLEKCLKNIHRIDLKTKIQKYKQSVQGAGTSYRNVLQAAIQKSLKDPSNNFRLHNGRSKEQRLKEQLGAQQEPVKKSIQESEAFLPQSIPEERYKMKSKPLGICLIIDCIGNETELLRDTFTSLGYEVQKFLHLSMHGISQILGQFACMPEHRDYDSFVCVLVSRGGSQSVYGVDQTHSGLPLHHIRRMFMGDSCPYLAGKPKMFFIQNYVVSEGQLEDSSLLEVDGPAMKNVEFKAQKRGLCTVHREADFFWSLCTADMSLLEQSHSSPSLYLQCLSQKLRQERKRPLLDLHIELNGL

SEQ ID NO: 203 - protein, 442 aa, Homo sapiens
MLERPPVCSKVDVVPPNVRDLLDILRERGKLSVGDLAELLYRVRRFDLLKRILKMDRKAVETHLLRNPHLVSDYRVLMAEIGEDLDKSDVSSLIFLMKDYMGRGKISKEKSFLDLVVELEKLNLVAPDQLDLLEKCLKNIHRIDLKTKIQKYKQSVQGAGTSYRNVLQAAIQKSLKDPSNNFRLHNGRSKEQRLKEQLGAQQEPVKKSIQESEAFLPQSIPEERYKMKSKPLGICLIIDCIGNETELLRDTFTSLGYEVQKFLHLSMHGISQILGQFACMPEHRDYDSFVCVLVSRGGSQSVYGVDQTHSGLPLHHIRRMFMGDSCPYLAGKPKMFFIQNYVVSEGQLEDSSLLEVDGPAMKNVEFKAQKRGLCTVHREADFFWSLCTADMSLLEQSHSSPSLYLQCLSQKLRQERKRPLLDLHIELNGYMYDSLEHTGGRY

SEQ ID NO: 204 - protein, 348 aa, Homo sapiens
MAEIGEDLDKSDVSSLIFLMKDYMGRGKISKEKSFLDLVVELEKLNLVAPDQLDLLEKCLKNIHRIDLKTKIQKYKQSVQGAGTSYRNVLQAAIQKSLKDPSNNFREEPVKKSIQESEAFLPQSIPEERYKMKSKPLGICLIIDCIGNETELLRDTFTSLGYEVQKFLHLSMHGISQILGQFACMPEHRDYDSFVCVLVSRGGSQSVYGVDQTHSGLPLHHIRRMFMGDSCPYLAGKPKMFFIQNYVVSEGQLEDSSLLEVDGPAMKNVEFKAQKRGLCTVHREADFFWSLCTADMSLLEQSHSSPSLYLQCLSQKLRQERGTIPGSGITESKDMHFSSLGCILLDVL

SEQ ID NO: 205 - protein, 445 aa, Homo sapiens
MSAEVIHQVEEALDTDEKEMLLFLCRDVAIDVVPPNVRDLLDILRERGKLSVGDLAELLYRVRRFDLLKRILKMDRKAVETHLLRNPHLVSDYRVLMAEIGEDLDKSDVSSLIFLMKDYMGRGKISKEKSFLDLVVELEKLNLVAPDQLDLLEKCLKNIHRIDLKTKIQKYKQSVQGAGTSYRNVLQAAIQKSLKDPSNNFRSIPEERYKMKSKPLGICLIIDCIGNETELLRDTFTSLGYEVQKFLHLSMHGISQILGQFACMPEHRDYDSFVCVLVSRGGSQSVYGVDQTHSGLPLHHIRRMFMGDSCPYLAGKPKMFFIQNYVVSEGQLEDSSLLEVDGPAMKNVEFKAQKRGLCTVHREADFFWSLCTADMSLLEQSHSSPSLYLQCLSQKLRQERKRPLLDLHIELNGYMYDWNSRVSAKEKYYVWLQHTLRKKLILSYT

SEQ ID NO: 206 - protein, 270 aa, Homo sapiens
MSAEVIHQVEEALDTDEKEMLLFLCRDVAIDVVPPNVRDLLDILRERGKLSVGDLAELLYRVRRFDLLKRILKMDRKAVETHLLRNPHLVSDYRVLMAEIGEDLDKSDVSSLIFLMKDYMGRGKISKEKSFLDLVVELEKLNLVAPDQLDLLEKCLKNIHRIDLKTKIQKYKQSVQGAGTSYRNVLQAAIQKSLKDPSNNFRSIPEERYKMKSKPLGICLIIDCIGNETELCGVRGPAGGQQPLGGGWASDEECGIQGSEARAVHSSPRS

SEQ ID NO: 207 - protein, 300 aa, Homo sapiens
MSAEVIHQVEEALDTDEKEMLLFLCRDVAIDVVPPNVRDLLDILRERGKLSVGDLAELLYRVRRFDLLKRILKMDRKAVETHLLRNPHLVSDYRVLMAEIGEDLDKSDVSSLIFLMKDYMGRGKISKEKSFLDLVVELEKLNLVAPDQLDLLEKCLKNIHRIDLKTKIQKYKQSVQGAGTSYRNVLQAAIQKSLKDPSNNFRLHNGRSKEQRLKEQLGAQQEPVKKSIQESEAFLPQSIPEERYKMKSKPLGICLIIDCIGNETENAHSWIFTLNSMATCMIGTAEFLPRRNIMFGCSTL

SEQ ID NO: 208 - protein, 462 aa, Homo sapiens
MSAEVIHQVEEALDTDEKEMLLFLCRDVAIDVVPPNVRDLLDILRERGKLSVGDLAELLYRVRRFDLLKRILKMDRKAVETHLLRNPHLVSDYRVLMAEIGEDLDKSDVSSLIFLMKDYMGRGKISKEKSFLDLVVELEKLNLVAPDQLDLLEKCLKNIHRIDLKTKIQKYKQSVQGAGTSYRNVLQAAIQKSLKDPSNNFRLHNGRSKEQRLKEQLGAQQEPVKKSIQESEAFLPQSIPEERYKMKSKPLGICLIIDCIGNETELLRDTFTSLGYEVQKFLHLSMHGISQILGQFACMPEHRDYDSFVCVLVSRGGSQSVYGVDQTHSGLPLHHIRRMFMGDSCPYLAGKPKMFFIQNYVVSEGQLEDSSLLEVDGPAMKNVEFKAQKRGLCTVHREADFFWSLCTADMSLLEQSHSSPSLYLQCLSQKLRQERGTIPGSGITESKDMHFSSLGCILLDVL

SEQ ID NO: 209 - protein, 292 aa, Homo sapiens
MSAEVIHQVEEALDTDEKEMLLFLCRDVAIDVVPPNVRDLLDILRERGKLSVGDLAELLYRVRRFDLLKRILKMDRKAVETHLLRNPHLVSDYRVLMAEIGEDLDKSDVSSLIFLMKDYMGRGKISKEKSFLDLVVELEKLNLVAPDQLDLLEKCLKNIHRIDLKTKIQKYKQSVQGAGTSYRNVLQAAIQKSLKDPSNNFRLHNGRSKEQRLKEQLGAQQEPVKKSIQESEAFLPQSIPEERYKMKSKPLGICLIIDCIGNETGWSAMAQSQLTAISTSQVQAILLPQPPE

SEQ ID NO: 210 - protein, 202 aa, Homo sapiens
MSAEVIHQVEEALDTDEKEMLLFLCRDVAIDVVPPNVRDLLDILRERGKLSVGDLAELLYRVRRFDLLKRILKMDRKAVETHLLRNPHLVSDYRVLMAEIGEDLDKSDVSSLIFLMKDYMGRGKISKEKSFLDLVVELEKLNLVAPDQLDLLEKCLKNIHRIDLKTKIQKYKQSVQGAGTSYRNVLQAAIQKSLKDPSNNFR

SEQ ID NO: 211 - protein, 435 aa, Homo sapiens
MSAEVIHQVEEALDTDEKEMLLFLCRDVAIDVVPPNVRDLLDILRERGKLSVGDLAELLYRVRRFDLLKRILKMDRKAVETHLLRNPHLVSDYRVLMAEIGEDLDKSDVSSLIFLMKDYMGRGKISKEKSFLDLVVELEKLNLVAPDQLDLLEKCLKNIHRIDLKTKIQKYKQSVQGAGTSYRNVLQAAIQKSLKDPSNNFRLHNGRSKEQRLKEQLGAQQEPVKKSIQESEAFLPQSIPEERYKMKSKPLGICLIIDCIGNETELLRDTFTSLGYEVQKFLHLSMHGISQILGQFACMPEHRDYDSFVCVLVSRGGSQSVYGVDQTHSGLPLHHIRRMFMGDSCPYLAGKPKMFFIQNYVVSEGQLEDSSLLEVDGPAMKNVEFKAQKRGLCTVHREADFFWSLCTADMSLLEQSHSSPSLYLQCLSQKLRQER

SEQ ID NO: 212 - protein, 384 aa, Homo sapiens
MAEIGEDLDKSDVSSLIFLMKDYMGRGKISKEKSFLDLVVELEKLNLVAPDQLDLLEKCLKNIHRIDLKTKIQKYKQSVQGAGTSYRNVLQAAIQKSLKDPSNNFRLHNGRSKEQRLKEQLGAQQEPVKKSIQESEAFLPQSIPEERYKMKSKPLGICLIIDCIGNETELLRDTFTSLGYEVQKFLHLSMHGISQILGQFACMPEHRDYDSFVCVLVSRGGSQSVYGVDQTHSGLPLHHIRRMFMGDSCPYLAGKPKMFFIQNYVVSEGQLEDSSLLEVDGPAMKNVEFKAQKRGLCTVHREADFFWSLCTADMSLLEQSHSSPSLYLQCLSQKLRQERKRPLLDLHIELNGYMYDWNSRVSAKEKYYVWLQHTLRKKLILSYT

SEQ ID NO: 213 - protein, 287 aa, Homo sapiens
MELERIVSAALLAFVQTHLPEADLSGLDEVIFSYVLGVLEDLGPSGPSEENFDMEAFTEMMEAYVPGFAHIPRGTIGDMMQKLSGQLSDARNKENLQPQSSGVQGQVPISPEPLQRPEMLKEETRSSAAAAADTQDEATGAEEELLPGVDVLLEVFPTCSVEQAQWVLAKARGDLEEAVQMLVEGKEEGPAAWEGPNQDLPRRLRGPQKDELKSFILQKYMMVDSAEDQKIHRPMAPKEAPKKLIRYIDNQVVSTKGERFKDVRNPEAEEMKATYINLKPARKYRFH

SEQ ID NO: 214 - protein, 1430 aa, Homo sapiens
MTVFRQENVDDYYDTGEELGSGQFAVVKKCREKSTGLQYAAKFIKKRRTKSSRRGVSREDIEREVSILKEIQHPNVITLHEVYENKTDVILILELVAGGELFDFLAEKESLTEEEATEFLKQILNGVYYLHSLQIAHFDLKPENIMLLDRNVPKPRIKIIDFGLAHKIDFGNEFKNIFGTPEFVAPEIVNYEPLGLEADMWSIGVITYILLSGASPFLGDTKQETLANVSAVNYEFEDEYFSNTSALAKDFIRRLLVKDPKKRMTIQDSLQHPWIKPKDTQQALSRKASAVNMEKFKKFAARKKWKQSVRLISLCQRLSRSFLSRSNMSVARSDDTLDEEDSFVMKAIIHAINDDNVPGLQHLLGSLSNYDVNQPNKHGTPPLLIAAGCGNIQILQLLIKRGSRIDVQDKGGSNAVYWAARHGHVDTLKFLSENKCPLDVKDKSGEMALHVAARYGHADVAQLLCSFGSNPNIQDKEEETPLHCAAWHGYYSVAKALCEAGCNVNIKNREGETPLLTASARGYHDIVECLAEHGADLNACDKDGHIALHLAVRRCQMEVIKTLLSQGCFVDYQDRHGNTPLHVACKDGNMPIVVALCEANCNLDISNKYGRTPLHLAANNGILDVVRYLCLMGASVEALTTDGKTAEDLARSEQHEHVAGLLARLRKDTHRGLFIQQLRPTQNLQPRIKLKLFGHSGSGKTTLVESLKCGLLRSFFRRRRPRLSSTNSSRFPPSPLASKPTVSVSINNLYPGCENVSVRSRSMMFEPGLTKGMLEVFVAPTHHPHCSADDQSTKAIDIQNAYLNGVGDFSVWEFSGNPVYFCCYDYFAANDPTSIHVVVFSLEEPYEIQLNQVIFWLSFLKSLVPVEEPIAFGGKLKNPLQVVLVATHADIMNVPRPAGGEFGYDKDTSLLKEIRNRFGNDLHISNKLFVLDAGASGSKDMKVLRNHLQEIRSQIVSVCPPMTHLCEKIISTLPSWRKLNGPNQLMSLQQFVYDVQDQLNPLASEEDLRRIAQQLHSTGEINIMQSETVQDVLLLDPRWLCTNVLGKLLSVETPRALHHYRGRYTVEDIQRLVPDSDVEELLQILDAMDICARDLSSGTMVDVPALIKTDNLHRSWADEEDEVMVYGGVRIVPVEHLTPFPCGIFHKVQVNLCRWIHQQSTEGDADIRLWVNGCKLANRGAELLVLLVNHGQGIEVQVRGLETEKIKCCLLLDSVCSTIENVMATTLPGLLTVKHYLSPQQLREHHEPVMIYQPRDFFRAQTLKETSLTNTMGGYKESFSSIMCFGCHDVYSQASLGMDIHASDLNLLTRRKLSRLLDPPDPLGKDWCLLAMNLGLPDLVAKYNTSNGAPKDFLPSPLHALLREWTTYPESTVGTLMSKLRELGRRDAADFLLKASSVFKINLDGNGQEAYASSCNSGTSYNSISSVVSR

SEQ ID NO: 215 - protein, 337 aa, Homo sapiens
MALHVAARYGHADVAQLLCSFGSNPNIQDKEEETPLHCAAWHGYYSVAKALCEAGCNVNIKNREGETPLLTASARGYHDIVECLAEHGADLNACDKDGHIALHLAVRRCQMEVIKTLLSQGCFVDYQDRHGNTPLHVACKDGNMPIVVALCEANCNLDISNKYGRTPLHLAANNGILDVVRYLCLMGASVEALTTDGKTAEDLARSEQHEHVAGLLARLRKDTHRGLFIQQLRPTQNLQPRIKLKLFGHSGSGKTTLVESLKCGLLRSFFRRRRPRLSSTNSSRFPPSPLASKPTGRNLHAGPVSPAGVGFRTLSFQGLGGKGVVFGSLGLYWTLWP

SEQ ID NO: 216 - protein, 1440 aa, Homo sapiens
MTVFRQENVDDYYDTGEELGSGQFAVVKKCREKSTGLQYAAKFIKKRRTKSSRRGVSREDIEREVSILKEIQHPNVITLHEVYENKTDVILILELVAGGELFDFLAEKESLTEEEATEFLKQILNGVYYLHSLQIAHFDLKPENIMLLDRNVPKPRIKIIDFGLAHKIDFGNEFKNIFGTPEFVAPEIVNYEPLGLEADMWSIGVITYILLSGASPFLGDTKQETLANVSAVNYEFEDEYFSNTSALAKDFIRRLLVKDPKKRMTIQDSLQHPWIKPKDTQQALSRKASAVNMEKFKKFAARKKWKQSVRLISLCQRLSRSFLSRSNMSVARSDDTLDEEDSFVMKAIIHAINDDNVPGLQHLLGSLSNYDVNQPNKHGTPPLLIAAGCGNIQILQLLIKRGSRIDVQDKGGSNAVYWAARHGHVDTLKFLSENKCPLDVKDKSGEMALHVAARYGHADVAQLLCSFGSNPNIQDKEEETPLHCAAWHGYYSVAKALCEAGCNVNIKNREGETPLLTASARGYHDIVECLAEHGADLNACDKDGHIALHLAVRRCQMEVIKTLLSQGCFVDYQDRHGNTPLHVACKDGNMPIVVALCEANCNLDISNKYGRTPLHLAANNGILDVVRYLCLMGASVEALTTDGKTAEDLARSEQHEHVAGLLARLRKDTHRGLFIQQLRPTQNLQPRIKLKLFGHSGSGKTTLVESLKCGLLRSFFRRRRPRLSSTNSSRFPPSPLASKPTVSVSINNLYPGCENVSVRSRSMMFEPGLTKGMLEVFVAPTHHPHCSADDQSTKAIDIQNAYLNGVGDFSVWEFSGNPVYFCCYDYFAANDPTSIHVVVFSLEEPYEIQLNQVIFWLSFLKSLVPVEEPIAFGGKLKNPLQVVLVATHADIMNVPRPAGGEFGYDKDTSLLKEIRNRFGNDLHISNKLFVLDAGASGSKDMKVLRNHLQEIRSQIVSVCPPMTHLCEKIISTLPSWRKLNGPNQLMSLQQFVYDVQDQLNPLASEEDLRRIAQQLHSTGEINIMQSETVQDVLLLDPRWLCTNVLGKLLSVETPRALHHYRGRYTVEDIQRLVPDSDVEELLQILDAMDICARDLSSGTMVDVPALIKTDNLHRSWADEEDEVMVYGGVRIVPVEHLTPFPCGIFHKVQVNLCRWIHQQSTEGDADIRLWVNGCKLANRGAELLVLLVNHGQGIEVQVRGLETEKIKCCLLLDSVCSTIENVMATTLPGLLTVKHYLSPQQLREHHEPVMIYQPRDFFRAQTLKETSLTNTMGGYKESFSSIMCFGCHDVYSQASLGMDIHASDLNLLTRRKLSRLLDPPDPLGKDWCLLAMNLGLPDLVAKYNTSNGAPKDFLPSPLHALLREWTTYPESTVGTLMSKLRELGRRDAADFLLKASSVFKINLDGNGQEAYASSCNSGTSYNSISSVVSRRNSHVWNPTV

SEQ ID NO: 217 - protein, 1364 aa, Homo sapiens
MTVFRQENVDDYYDTGEELGSGQFAVVKKCREKSTGLQYAAKFIKKRRTKSSRRGVSREDIEREVSILKEIQHPNVITLHEVYENKTDVILILELVAGGELFDFLAEKESLTEEEATEFLKQILNGVYYLHSLQIAHFDLKPENIMLLDRNVPKPRIKIIDFGLAHKIDFGNEFKNIFGTPEFVAPEIVNYEPLGLEADMWSIGVITYILLSGASPFLGDTKQETLANVSAVNYEFEDEYFSNTSALAKDFIRRLLVKDPKKRMTIQDSLQHPWIKPKDTQQALSRKASAVNMEKFKKFAARKKWKQSVRLISLCQRLSRSFLSRSNMSVARSDDTLDEEDSFVMKAIIHAINDDNVPGLQHLLGSLSNYDVNQPNKHGTPPLLIAAGCGNIQILQLLIKRGSRIDVQDKGGSNAVYWAARHGHVDTLKFLSENKCPLDVKDKSGEMALHVAARYGHADVAQLLCSFGSNPNIQDKEEETPLHCAAWHGYYSVAKALCEAGCNVNIKNREGETPLLTASARGYHDIVECLAEHGADLNACDKDGHIALHLAVRRCQMEVIKTLLSQGCFVDYQDRHGNTPLHVACKDGNMPIVVALCEANCNLDISNKYGRTPLHLAANNGILDVVRYLCLMGASVEALTTDGKTAEDLARSEQHEHVAGLLARLRKDTHRGLFIQQLRPTQNLQPRIKLKLFGHSGSGKTTLVESLKCGLLRSFFRRRRPRLSSTNSSRFPPSPLASKPTVSVSINNLYPGCENVSVRSRSMMFEPGLTKGMLEVFVAPTHHPHCSADDQSTKAIDIQNAYLNAFGGKLKNPLQVVLVATHADIMNVPRPAGGEFGYDKDTSLLKEIRNRFGNDLHISNKLFVLDAGASGSKDMKVLRNHLQEIRSQIVSVCPPMTHLCEKIISTLPSWRKLNGPNQLMSLQQFVYDVQDQLNPLASEEDLRRIAQQLHSTGEINIMQSETVQDVLLLDPRWLCTNVLGKLLSVETPRALHHYRGRYTVEDIQRLVPDSDVEELLQILDAMDICARDLSSGTMVDVPALIKTDNLHRSWADEEDEVMVYGGVRIVPVEHLTPFPCGIFHKVQVNLCRWIHQQSTEGDADIRLWVNGCKLANRGAELLVLLVNHGQGIEVQVRGLETEKIKCCLLLDSVCSTIENVMATTLPGLLTVKHYLSPQQLREHHEPVMIYQPRDFFRAQTLKETSLTNTMGGYKESFSSIMCFGCHDVYSQASLGMDIHASDLNLLTRRKLSRLLDPPDPLGKDWCLLAMNLGLPDLVAKYNTSNGAPKDFLPSPLHALLREWTTYPESTVGTLMSKLRELGRRDAADFLLKASSVFKINLDGNGQEAYASSCNSGTSYNSISSVVSR

SEQ ID NO: 218 - protein, 427 aa, Homo sapiens
METLCLRASFWLALVGCVISDNPERYSTNLSNHVDDFTTFRGTELSFLVTTHQPTNLVLPSNGSMHNYCPQQTKITSAFKYINTVISCTIFIVGMVGNATLLRIIYQNKCMRNGPNALIASLALGDLIYVVIDLPINVFKLLAGRWPFDHNDFGVFLCKLFPFLQKSSVGITVLNLCALSVDRYRAVASWSRVQGIGIPLVTAIEIVSIWILSFILAIPEAIGFVMVPFEYRGEQHKTCMLNATSKFMEFYQDVKDWWLFGFYFCMPLVCTAIFYTLMTCEMLNRRNGSLRIALSEHLKQRREVAKTVFCLVVIFALCWFPLHLSRILKKTVYNEMDKNRCELLSFLLLMDYIGINLATMNSCINPIALYFVSKKFKNCFQSCLCCCCYQSKSLMTSVPMNGTSIQWKNHDQNNHNTDRSSHKDSMN

SEQ ID NO: 219 - protein, 161 aa, Homo sapiens
METLCLRASFWLALVGCVISDNPERYSTNLSNHVDDFTTFRGTELSFLVTTHQPTNLVLPSNGSMHNYCPQQTKITSAFKYINTVISCTIFIVGMVGNATLLRIIYQNKCMRNGPNALIASLALGDLIYVVIDLPINVFKVQSSCLLESCSGNWDSFGNCH

SEQ ID NO: 220 - protein, 187 aa, Homo sapiens
METLCLRASFWLALVGCVISDNPERYSTNLSNHVDDFTTFRGTELSFLVTTHQPTNLVLPSNGSMHNYCPQQTKITSAFKYINTVISCTIFIVGMVGNATLLRIIYQNKCMRNGPNALIASLALGDLIYVVIDLPINVFKLLAGRWPFDHNDFGVFLCKLFPFLQKSSVGITVLNLCALSVDSSTKM

SEQ ID NO: 221 - protein, 318 aa, Homo sapiens
METLCLRASFWLALVGCVISDNPERYSTNLSNHVDDFTTFRGTELSFLVTTHQPTNLVLPSNGSMHNYCPQQTKITSAFKYINTVISCTIFIVGMVGNATLLRIIYQNKCMRNGPNALIASLALGDLIYVVIDLPINVFKFYQDVKDWWLFGFYFCMPLVCTAIFYTLMTCEMLNRRNGSLRIALSEHLKQRREVAKTVFCLVVIFALCWFPLHLSRILKKTVYNEMDKNRCELLSFLLLMDYIGINLATMNSCINPIALYFVSKKFKNCFQSCLCCCCYQSKSLMTSVPMNGTSIQWKNHDQNNHNTDRSSHKDSMN

SEQ ID NO: 222 - protein, 202 aa, Homo sapiens
MVPFEYRGEQHKTCMLNATSKFMEFYQDVKDWWLFGFYFCMPLVCTAIFYTLMTCEMLNRRNGSLRIALSEHLKQRREVAKTVFCLVVIFALCWFPLHLSRILKKTVYNEMDKNRCELLSFLLLMDYIGINLATMNSCINPIALYFVSKKFKNCFQSCLCCCCYQSKSLMTSVPMNGTSIQWKNHDQNNHNTDRSSHKDSMN

SEQ ID NO: 223 - protein, 814 aa, Homo sapiens
MQDAENVAVPEAAEERAEPGQQQPAAEPPPAEGLLRPAGPGAPEAAGTEASSEEVGIAEAGPESEVRTEPAAEAEAASGPSESPSPPAAEELPGSHAEPPVPAQGEAPGEQARDERSDSRAQAVSEDAGGNEGRAAEAEPRALENGDADEPSFSDPEDFVDDVSEEELLGDVLKDRPQEADGIDSVIVVDNVPQVGPDRLEKLKNVIHKIFSKFGKITNDFYPEEDGKTKGYIFLEYASPAHAVDAVKNADGYKLDKQHTFRVNLFTDFDKYMTISDEWDIPEKQPFKDLGNLRYWLEEAECRDQYSVIFESGDRTSIFWNDVKDPVSIEERARWTETYVRWSPKGTYLATFHQRGIALWGGEKFKQIQRFSHQGVQLIDFSPCERYLVTFSPLMDTQDDPQAIIIWDILTGHKKRGFHCESSAHWPIFKWSHDGKFFARMTLDTLSIYETPSMGLLDKKSLKISGIKDFSWSPGGNIIAFWVPEDKDIPARVTLMQLPTRQEIRVRNLFNVVDCKLHWQKNGDYLCVKVDRTPKGTQGVVTNFEIFRMREKQVPVDVVEMKETIIAFAWEPNGSKFAVLHGEAPRISVSFYHVKNNGKIELIKMFDKQQANTIFWSPQGQFVVLAGLRSMNGALAFVDTSDCTVMNIAEHYMASDVEWDPTGRYVVTSVSWWSHKVDNAYWLWTFQGRLLQKNNKDRFCQLLWRPRPPTLLSQEQIKQIKKDLKKYSKIFEQKDRLSQSKASKELVERRRTMMEDFRKYRKMAQELYMEQKNERLELRGGVDTDELDSNVDDWEEETIEFFVTEEIIPLGNQE

SEQ ID NO: 224 - protein, 873 aa, Homo sapiens
MQDAENVAVPEAAEERAEPGQQQPAAEPPPAEGLLRPAGPGAPEAAGTEASSEEVGIAEAGPESEVRTEPAAEAEAASGPSESPSPPAAEELPGSHAEPPVPAQGEAPGEQARDERSDSRAQAVSEDAGGNEGRAAEAEPRALENGDADEPSFSDPEDFVDDVSEEELLGDVLKDRPQEADGIDSVIVVDNVPQVGPDRLEKLKNVIHKIFSKFGKITNDFYPEEDGKTKGYIFLEYASPAHAVDAVKNADGYKLDKQHTFRVNLFTDFDKYMTISDEWDIPEKQPFKDLGNLRYWLEEAECRDQYSVIFESGDRTSIFWNDVKDPVSIEERARWTETYVRWSPKGTYLATFHQRGIALWGGEKFKQIQRFSHQGVQLIDFSPCERYLVTFSPLMDTQDDPQAIIIWDILTGHKKRGFHCESSAHWPIFKWSHDGKFFARMTLDTLSIYETPSMGLLDKKSLKISGIKDFSWSPGGNIIAFWVPEDKDIPARVTLMQLPTRQEIRVRNLFNVVDCKLHWQKNGDYLCVKVDRTPKGTQGVVTNFEIFRMREKQVPVDVVEMKETIIAFAWEPNGSKFAVLHGEAPRISVSFYHVKNNGKIELIKMFDKQQANTIFWSPQGQFVVLAGLRSMNGALAFVDTSDCTVMNIAEHYMASDVEWDPTGRYVVTSVSWWSHKVDNAYWLWTFQGRLLQKNNKDRFCQLLWRPRPPTLLSQEQIKQIKKDLKKYSKIFEQKDRLSQSKASKELVERRRTMMEDFRKYRKMAQELYMEQKNERLELRGGVDTDELDSNVDDWEEETIEFFVTEEIIPLGIRSDLEHCAQPCVLWSRGRPAGSRVTPASSLCSLALDCDCAWILPLRHIFVPFSPWCLQWGI

SEQ ID NO: 225 - protein, 134 aa, Homo sapiens
MKAFSPVRSVRKNSLSDHSLGISRSKTPVDDPMSLLYNMNDCYSKLKELVPSIPQNKKVSKMEILQHVIDYILDLQIALDSHPTIVSLHHQRPGQNQASRTPLTTLNTDISILSLQASEFPSELMSNDSKALCG

SEQ ID NO: 226 - protein, 664 aa, Homo sapiens
METPSQRRATRSGAQASSTPLSPTRITRLQEKEDLQELNDRLAVYIDRVRSLETENAGLRLRITESEEVVSREVSGIKAAYEAELGDARKTLDSVAKERARLQLELSKVREEFKELKARNTKKEGDLIAAQARLKDLEALLNSKEAALSTALSEKRTLEGELHDLRGQVAKLEAALGEAKKQLQDEMLRRVDAENRLQTMKEELDFQKNIYSEELRETKRRHETRLVEIDNGKQREFESRLADALQELRAQHEDQVEQYKKELEKTYSAKLDNARQSAERNSNLVGAAHEELQQSRIRIDSLSAQLSQLQKQLAAKEAKLRDLEDSLARERDTSRRLLAEKEREMAEMRARMQQQLDEYQELLDIKLALDMEIHAYRKLLEGEEERLRLSPSPTSQRSRGRASSHSSQTQGGGSVTKKRKLESTESRSSFSQHARTSGRVAVEEVDEEGKFVRLRNKSNEDQSMGNWQIKRQNGDDPLLTYRFPPKFTLKAGQVVTIWAAGAGATHSPPTDLVWKAQNTWGCGNSLRTALINSTGEEVAMRKLVRSVTVVEDDEDEDGDDLLHHHHGSHCSSSGDPAEYNLRSRTVLCGTCGQPADKASASGSGAQVGGPISSGSSASSVTVTRSYRSVGGSGGGSFGDNLVTRSYLLGNSSPRTQSPQNCSIM

SEQ ID NO: 227 - protein, 572 aa, Homo sapiens
METPSQRRATRSGAQASSTPLSPTRITRLQEKEDLQELNDRLAVYIDRVRSLETENAGLRLRITESEEVVSREVSGIKAAYEAELGDARKTLDSVAKERARLQLELSKVREEFKELKARNTKKEGDLIAAQARLKDLEALLNSKEAALSTALSEKRTLEGELHDLRGQVAKLEAALGEAKKQLQDEMLRRVDAENRLQTMKEELDFQKNIYSEELRETKRRHETRLVEIDNGKQREFESRLADALQELRAQHEDQVEQYKKELEKTYSAKLDNARQSAERNSNLVGAAHEELQQSRIRIDSLSAQLSQLQKQLAAKEAKLRDLEDSLARERDTSRRLLAEKEREMAEMRARMQQQLDEYQELLDIKLALDMEIHAYRKLLEGEEERLRLSPSPTSQRSRGRASSHSSQTQGGGSVTKKRKLESTESRSSFSQHARTSGRVAVEEVDEEGKFVRLRNKSNEDQSMGNWQIKRQNGDDPLLTYRFPPKFTLKAGQVVTIWAAGAGATHSPPTDLVWKAQNTWGCGNSLRTALINSTGEEVAMRKLVRSVTVVEDDEDEDGDDLLHHHHVSGSRR

SEQ ID NO: 228 - protein, 634 aa, Homo sapiens
METPSQRRATRSGAQASSTPLSPTRITRLQEKEDLQELNDRLAVYIDRVRSLETENAGLRLRITESEEVVSREVSGIKAAYEAELGDARKTLDSVAKERARLQLELSKVREEFKELKARNTKKEGDLIAAQARLKDLEALLNSKEAALSTALSEKRTLEGELHDLRGQVAKLEAALGEAKKQLQDEMLRRVDAENRLQTMKEELDFQKNIYSEELRETKRRHETRLVEIDNGKQREFESRLADALQELRAQHEDQVEQYKKELEKTYSAKLDNARQSAERNSNLVGAAHEELQQSRIRIDSLSAQLSQLQKQLAAKEAKLRDLEDSLARERDTSRRLLAEKEREMAEMRARMQQQLDEYQELLDIKLALDMEIHAYRKLLEGEEERLRLSPSPTSQRSRGRASSHSSQTQGGGSVTKKRKLESTESRSSFSQHARTSGRVAVEEVDEEGKFVRLRNKSNEDQSMGNWQIKRQNGDDPLLTYRFPPKFTLKAGQVVTIWAAGAGATHSPPTDLVWKAQNTWGCGNSLRTALINSTGEGSHCSSSGDPAEYNLRSRTVLCGTCGQPADKASASGSGAQVGGPISSGSSASSVTVTRSYRSVGGSGGGSFGDNLVTRSYLLGNSSPRTQSPQNCSIM

SEQ ID NO: 229 - protein, 574 aa, Homo sapiens
MGNSEGCNTKKEGDLIAAQARLKDLEALLNSKEAALSTALSEKRTLEGELHDLRGQVAKLEAALGEAKKQLQDEMLRRVDAENRLQTMKEELDFQKNIYSEELRETKRRHETRLVEIDNGKQREFESRLADALQELRAQHEDQVEQYKKELEKTYSAKLDNARQSAERNSNLVGAAHEELQQSRIRIDSLSAQLSQLQKQLAAKEAKLRDLEDSLARERDTSRRLLAEKEREMAEMRARMQQQLDEYQELLDIKLALDMEIHAYRKLLEGEEERLRLSPSPTSQRSRGRASSHSSQTQGGGSVTKKRKLESTESRSSFSQHARTSGRVAVEEVDEEGKFVRLRNKSNEDQSMGNWQIKRQNGDDPLLTYRFPPKFTLKAGQVVTIWAAGAGATHSPPTDLVWKAQNTWGCGNSLRTALINSTGEEVAMRKLVRSVTVVEDDEDEDGDDLLHHHHGSHCSSSGDPAEYNLRSRTVLCGTCGQPADKASASGSGAQVGGPISSGSSASSVTVTRSYRSVGGSGGGSFGDNLVTRSYLLGNSSPRTQSPQNCSIIQEMGMRWEVEEGRRKVSLSCLP

SEQ ID NO: 230 - protein, 565 aa, Homo sapiens
MDLEAWDPHLEPDAEAMVDGNTKKEGDLIAAQARLKDLEALLNSKEAALSTALSEKRTLEGELHDLRGQVAKLEAALGEAKKQLQDEMLRRVDAENRLQTMKEELDFQKNIYSEELRETKRRHETRLVEIDNGKQREFESRLADALQELRAQHEDQVEQYKKELEKTYSAKLDNARQSAERNSNLVGAAHEELQQSRIRIDSLSAQLSQLQKQLAAKEAKLRDLEDSLARERDTSRRLLAEKEREMAEMRARMQQQLDEYQELLDIKLALDMEIHAYRKLLEGEEERLRLSPSPTSQRSRGRASSHSSQTQGGGSVTKKRKLESTESRSSFSQHARTSGRVAVEEVDEEGKFVRLRNKSNEDQSMGNWQIKRQNGDDPLLTYRFPPKFTLKAGQVVTIWAAGAGATHSPPTDLVWKAQNTWGCGNSLRTALINSTGEEVAMRKLVRSVTVVEDDEDEDGDDLLHHHHGSHCSSSGDPAEYNLRSRTVLCGTCGQPADKASASGSGAQVGGPISSGSSASSVTVTRSYRSVGGSGGGSFGDNLVTRSYLLGNSSPRTQSPQNCSIM

SEQ ID NO: 231 - protein, 614 aa, Homo sapiens
METPSQRRATRSGAQASSTPLSPTRITRLQEKEDLQELNDRLAVYIDRVRSLETENAGLRLRITESEEVVSREVSGIKAAYEAELGDARKTLDSVAKERARLQLELSKVREEFKELKARNTKKEGDLIAAQARLKDLEALLNSKEAALSTALSEKRTLEGELHDLRGQVAKLEAALGEAKKQLQDEMLRRVDAENRLQTMKEELDFQKNIYSEELRETKRRHETRLVEIDNGKQREFESRLADALQELRAQHEDQVEQYKKELEKTYSAKLDNARQSAERNSNLVGAAHEELQQSRIRIDSLSAQLSQLQKQLAAKEAKLRDLEDSLARERDTSRRLLAEKEREMAEMRARMQQQLDEYQELLDIKLALDMEIHAYRKLLEGEEERLRLSPSPTSQRSRGRASSHSSQTQGGGSVTKKRKLESTESRSSFSQHARTSGRVAVEEVDEEGKFVRLRNKSNEDQSMGNWQIKRQNGDDPLLTYRFPPKFTLKAGQVVTIWAAGAGATHSPPTDLVWKAQNTWGCGNSLRTALINSTGEEVAMRKLVRSVTVVEDDEDEDGDDLLHHHHGSHCSSSGDPAEYNLRSRTVLCGTCGQPADKASASGSGAQSPQNCSIM

SEQ ID NO: 232 - protein, 2225 aa, Homo sapiens
MAALVLEDGSVLRGQPFGAAVSTAGEVVFQTGMVGYPEALTDPSYKAQILVLTYPLIGNYGIPPDEMDEFGLCKWFESSGIHVAALVVGECCPTPSHWSATRTLHEWLQQHGIPGLQGVDTRELTKKLREQGSLLGKLVQNGTEPSSLPFLDPNARPLVPEVSIKTPRVFNTGGAPRILALDCGLKYNQIRCLCQRGAEVTVVPWDHALDSQEYEGLFLSNGPGDPASYPSVVSTLSRVLSEPNPRPVFGICLGHQLLALAIGAKTYKMRYGNRGHNQPCLLVGSGRCFLTSQNHGFAVETDSLPADWAPLFTNANDGSNEGIVHNSLPFFSVQFHPEHQAGPSDMELLFDIFLETVKEATAGNPGGQTVRERLTERLCPPGIPTPGSGLPPPRKVLILGSGGLSIGQAGEFDYSGSQAIKALKEENIQTLLINPNIATVQTSQGLADKVYFLPITPHYVTQVIRNERPDGVLLTFGGQTALNCGVELTKAGVLARYGVRVLGTPVETIELTEDRRAFAARMAEIGEHVAPSEAANSLEQAQAAAERLGYPVLVRAAFALGGLGSGFASNREELSALVAPAFAHTSQVLVDKSLKGWKEIEYEVVRDAYGNCVTVCNMENLDPLGIHTGESIVVAPSQTLNDREYQLLRQTAIKVTQHLGIVGECNVQYALNPESEQYYIIEVNARLSRSSALASKATGYPLAYVAAKLALGIPLPELRNSVTGGTAAFEPSVDYCVVKIPRWDLSKFLRVSTKIGSCMKSVGEVMGIGRSFEEAFQKALRMVDENCVGFDHTVKPVSDMELETPTDKRIFVVAAALWAGYSVDRLYELTRIDRWFLHRMKRIIAHAQLLEQHRGQPLPPDLLQQAKCLGFSDKQIALAVLSTELAVRKLRQELGICPAVKQIDTVAAEWPAQTNYLYLTYWGTTHDLTFRTPHVLVLGSGVYRIGSSVEFDWCAVGCIQQLRKMGYKTIMVNYNPETVSTDYDMCDRLYFDEISFEVVMDIYELENPEGVILSMGGQLPNNMAMALHRQQCRVLGTSPEAIDSAENRFKFSRLLDTIGISQPQWRELSDLESARQFCQTVGYPCVVRPSYVLSGAAMNVAYTDGDLERFLSSAAAVSKEHPVVISKFIQEAKEIDVDAVASDGVVAAIAISEHVENAGVHSGDATLVTPPQDITAKTLERIKAIVHAVGQELQVTGPFNLQLIAKDDQLKVIECNVRVSRSFPFVSKTLGVDLVALATRVIMGEEVEPVGLMTGSGVVGVKVPQFSFSRLAGADVVLGVEMTSTGEVAGFGESRCEAYLKAMLSTGFKIPKKNILLTIGSYKNKSELLPTVRLLESLGYSLYASLGTADFYTEHGVKVTAVDWHFEEAVDGECPPQRSILEQLAEKNFELVINLSMRGAGGRRLSSFVTKGYRTRRLAADFSVPLIIDIKCTKLFVEALGQIGPAPPLKVHVDCMTSQKLVRLPGLIDVHVHLREPGGTHKEDFASGTAAALAGGITMVCAMPNTRPPIIDAPALALAQKLAEAGARCDFALFLGASSENAGTLGTVAGSAAGLKLYLNETFSELRLDSVVQWMEHFETWPSHLPIVAHAEQQTVAAVLMVAQLTQRSVHICHVARKEEILLIKAAKARGLPVTCEVAPHHLFLSHDDLERLGPGKGEVRPELGSRQDVEALWENMAVIDCFASDHAPHTLEEKCGSRPPPGFPGLETMLPLLLTAVSEGRLSLDDLLQRLHHNPRRIFHLPPQEDTYVEVDLEHEWTIPSHMPFSKAHWTPFEGQKVKGTVRRVVLRGEVAYIDGQVLVPPGYGQDVRKWPQGAVPQLPPSAPATSEMTTTPERPRRGIPGLPDGRFHLPPRIHRASDPGLPAEEPKEKSSRKVAEPELMGTPDGTCYPPPPVPRQASPQNLGTPGLLHPQTSPLLHSLVGQHILSVQQFTKDQMSHLFNVAHTLRMMVQKERSLDILKGKVMASMFYEVSTRTSSSFAAAMARLGGAVLSFSEATSSVQKGESLADSVQTMSCYADVVVLRHPQPGAVELAAKHCRRPVINAGDGVGEHPTQALLDIFTIREELGTVNGMTITMVGDLKHGRTVHSLACLLTQYRVSLRYVAPPSLRMPPTVRAFVASRGTKQEEFESIEEALPDTDVLYMTRIQKERFGSTQEYEACFGQFILTPHIMTRAKKKMVVMHPMPRVNEISVEVDSDPRAAYFRQAENGMYIRMALLATVLGRF

SEQ ID NO: 233 - protein, 134 aa, Homo sapiens
MGRSRRTGAHRAHSLARQMKAKRRRPDLDEIHRELRPQGSARPQPDPNAEFDPDLPGGGLHRCLACARYFIDSTNLKTHFRSKDHKKRLKQLSVEPYSQEEAERAAGMGSYVPPRRLAVPTEVSTEVPEMDTST

SEQ ID NO: 234 - protein, 367 aa, Homo sapiens
MSSPPPARSGFYRQEVTKTAWEVRAVYRDLQPVGSGAYGAVCSAVDGRTGAKVAIKKLYRPFQSELFAKRAYRELRLLKHMRHENVIGLLDVFTPDETLDDFTDFYLVMPFMGTDLGKLMKHEKLGEDRIQFLVYQMLKGLRYIHAAGIIHRDLKPGNLAVNEDCELKILDFGLARQADSEMTGYVVTRWYRAPEVILNWMRYTQTVDIWSVGCIMAEMITGKTLFKGSDHLDQLKEIMKVTGTPPAEFVQRLQSDEAKNYMKGLPELEKKDFASILTNASPLAVNLLEKMLVLDAEQRVTAGEALAHPYFESLHDTEDEPQVQKYDDSFDDVDRTLDEWKRVTYKEVLSFKPPRQLGARVSKETPL

SEQ ID NO: 235 - protein, 357 aa, Homo sapiens
MSSPPPARSGFYRQEVTKTAWEVRAVYRDLQPVGSGAYGAVCSAVDGRTGAKVAIKKLYRPFQSELFAKRAYRELRLLKHMRHENVIGLLDVFTPDETLDDFTDFYLVMPFMGTDLGKLMKHEKLGEDRIQFLVYQMLKGLRDLKPGNLAVNEDCELKILDFGLARQADSEMTGYVVTRWYRAPEVILNWMRYTQTVDIWSVGCIMAEMITGKTLFKGSDHLDQLKEIMKVTGTPPAEFVQRLQSDEAKNYMKGLPELEKKDFASILTNASPLAVNLLEKMLVLDAEQRVTAGEALAHPYFESLHDTEDEPQVQKYDDSFDDVDRTLDEWKRVTYKEVLSFKPPRQLGARVSKETPL

SEQ ID NO: 236 - protein, 543 aa, Homo sapiens
MGTSLSPNDPWPLNPLSIQQTTLLLLLSVLATVHVGQRLLRQRRRQLRSAPPGPFAWPLIGNAAAVGQAAHLSFARLARRYGDVFQIRLGSCPIVVLNGERAIHQALVQQGSAFADRPAFASFRVVSGGRSMAFGHYSEHWKVQRRAAHSMMRNFFTRQPRSRQVLEGHVLSEARELVALLVRGSADGAFLDPRPLTVVAVANVMSAVCFGCRYSHDDPEFRELLSHNEEFGRTVGAGSLVDVMPWLQYFPNPVRTVFREFEQLNRNFSNFILDKFLRHCESLRPGAAPRDMMDAFILSAEKKAAGDSHGGGARLDLENVPATITDIFGASQDTLSTALQWLLLLFTRYPDVQTRVQAELDQVVGRDRLPCMGDQPNLPYVLAFLYEAMRFSSFVPVTIPHATTANTSVLGYHIPKDTVVFVNQWSVNHDPLKWPNPENFDPARFLDKDGLINKDLTSRVMIFSVGKRRCIGEELSKMQLFLFISILAHQCDFRANPNEPAKMNFSYGLTIKPKSFKVNVTLRESMELLDSAVQNLQAKETCQ

SEQ ID NO: 237 - protein, 485 aa, Homo sapiens
MRKRAPQSEMAPAGVSLRATILCLLAWAGLAAGDRVYIHPFHLVIHNESTCEQLAKANAGKPKDPTFIPAPIQAKTSPVDEKALQDQLVLVAAKLDTEDKLRAAMVGMLANFLGFRIYGMHSELWGVVHGATVLSPTAVFGTLASLYLGALDHTADRLQAILGVPWKDKNCTSRLDAHKVLSALQAVQGLLVAQGRADSQAQLLLSTVVGVFTAPGLHLKQPFVQGLALYTPVVLPRSLDFTELDVAAEKIDRFMQAVTGWKTGCSLMGASVDSTLAFNTYVHFQGKMKGFSLLAEPQEFWVDNSTSVSVPMLSGMGTFQHWSDIQDNFSVTQVPFTESACLLLIQPHYASDLDKVEGLTFQQNSLNWMKKLSPRTIHLTMPQLVLQGSYDLQDLLAQAELPAILHTELNLQKLSNDRIRVGEVLNSIFFELEADEREPTESTQQLNKPEVLEVTLNRPFLFAVYDQSATALHFLGRVANPLSTA

SEQ ID NO: 238 - protein, 2843 aa, Homo sapiens
MAAASYDQLLKQVEALKMENSNLRQELEDNSNHLTKLETEASNMKEVLKQLQGSIEDEAMASSGQIDLLERLKELNLDSSNFPGVKLRSKMSLRSYGSREGSVSSRSGECSPVPMGSFPRRGFVNGSRESTGYLEELEKERSLLLADLDKEEKEKDWYYAQLQNLTKRIDSLPLTENFSLQTDMTRRQLEYEARQIRVAMEEQLGTCQDMEKRAQRRIARIQQIEKDILRIRQLLQSQATEAERSSQNKHETGSHDAERQNEGQGVGEINMATSGNGQGSTTRMDHETASVLSSSSTHSAPRRLTSHLGTKVEMVYSLLSMLGTHDKDDMSRTLLAMSSSQDSCISMRQSGCLPLLIQLLHGNDKDSVLLGNSRGSKEARARASAALHNIIHSQPDDKRGRREIRVLHLLEQIRAYCETCWEWQEAHEPGMDQDKNPMPAPVEHQICPAVCVLMKLSFDEEHRHAMNELGGLQAIAELLQVDCEMYGLTNDHYSITLRRYAGMALTNLTFGDVANKATLCSMKGCMRALVAQLKSESEDLQQVIASVLRNLSWRADVNSKKTLREVGSVKALMECALEVKKESTLKSVLSALWNLSAHCTENKADICAVDGALAFLVGTLTYRSQTNTLAIIESGGGILRNVSSLIATNEDHRQILRENNCLQTLLQHLKSHSLTIVSNACGTLWNLSARNPKDQEALWDMGAVSMLKNLIHSKHKMIAMGSAAALRNLMANRPAKYKDANIMSPGSSLPSLHVRKQKALEAELDAQHLSETFDNIDNLSPKASHRSKQRHKQSLYGDYVFDTNRHDDNRSDNFNTGNMTVLSPYLNTTVLPSSSSSRGSLDSSRSEKDRSLERERGIGLGNYHPATENPGTSSKRGLQISTTAAQIAKVMEEVSAIHTSQEDRSSGSTTELHCVTDERNALRRSSAAHTHSNTYNFTKSENSNRTCSMPYAKLEYKRSSNDSLNSVSSSDGYGKRGQMKPSIESYSEDDESKFCSYGQYPADLAHKIHSANHMDDNDGELDTPINYSLKYSDEQLNSGRQSPSQNERWARPKHIIEDEIKQSEQRQSRNQSTTYPVYTESTDDKHLKFQPHFGQQECVSPYRSRGANGSETNRVGSNHGINQNVSQSLCQEDDYEDDKPTNYSERYSEEEQHEEEERPTNYSIKYNEEKRHVDQPIDYSLKYATDIPSSQKQSFSFSKSSSGQSSKTEHMSSSSENTSTPSSNAKRQNQLHPSSAQSRSGQPQKAATCKVSSINQETIQTYCVEDTPICFSRCSSLSSLSSAEDEIGCNQTTQEADSANTLQIAEIKEKIGTRSAEDPVSEVPAVSQHPRTKSSRLQGSSLSSESARHKAVEFSSGAKSPSKSGAQTPKSPPEHYVQETPLMFSRCTSVSSLDSFESRSIASSVQSEPCSGMVSGIISPSDLPDSPGQTMPPSRSKTPPPPPQTAQTKREVPKNKAPTAEKRESGPKQAAVNAAVQRVQVLPDADTLLHFATESTPDGFSCSSSLSALSLDEPFIQKDVELRIMPPVQENDNGNETESEQPKESNENQEKEAEKTIDSEKDLLDDSDDDDIEILEECIISAMPTKSSRKAKKPAQTASKLPPPVARKPSQLPVYKLLPSQNRLQPQKHVSFTPGDDMPRVYCVEGTPINFSTATSLSDLTIESPPNELAAGEGVRGGAQSGEFEKRDTIPTEGRSTDEAQGGKTSSVTIPELDDNKAEEGDILAECINSAMPKGKSHKPFRVKKIMDQVQQASASSSAPNKNQLDGKKKKPTSPVKPIPQNTEYRTRVRKNADSKNNLNAERVFSDNKDSKKQNLKNNSKVFNDKLPNNEDRVRGSFAFDSPHHYTPIEGTPYCFSRNDSLSSLDFDDDDVDLSREKAELRKAKENKESEAKVTSHTELTSNQQSANKTQAIAKQPINRGQPKPILQKQSTFPQSSKDIPDRGAATDEKLQNFAIENTPVCFSHNSSLSSLSDIDQENNNKENEPIKETEPPDSQGEPSKPQASGYAPKSFHVEDTPVCFSRNSSLSSLSIDSEDDLLQECISSAMPKKKKPSRLKGDNEKHSPRNMGGILGEDLTLDLKDIQRPDSEHGLSPDSENFDWKAIQEGANSIVSSLHQAAAAACLSRQASSDSDSILSLKSGISLGSPFHLTPDQEEKPFTSNKGPRILKPGEKSTLETKKIESESKGIKGGKKVYKSLITGKVRSNSEISGQMKQPLQANMPSISRGRTMIHIPGVRNSSSSTSPVSKKGPPLKTPASKSPSEGQTATTSPRGAKPSVKSELSPVARQTSQIGGSSKAPSRSGSRDSTPSRPAQQPLSRPIQSPGRNSISPGRNGISPPNKLSQLPRTSSPSTASTKSSGSGKMSYTSPGRQMSQQNLTKQTGLSKNASSIPRSESASKGLNQMNNGNGANKKVELSRMSSTKSSGSESDRSERPVLVRQSTFIKEAPSPTLRRKLEESASFESLSPSSRPASPTRSQAQTPVLSPSLPDMSLSTHSSVQAGGWRKLPPNLSPTIEYNDGRPAKRHDIARSHSESPSRLPINRSGTWKREHSKHSSSLPRVSTWRRTGSSSSILSASSESSEKAKSEDEKHVNSISGTKQSKENQVSAKGTWRKIKENEFSPTNSTSQTVSSGATNGAESKTLIYQMAPAVSKTEDVWVRIEDCPINNPRSGRSPTGNTPPVIDSVSEKANPNIKDSKDNQAKQNVGNGSVPMRTVGLENRLNSFIQVDAPDQKGTEIKPGQNNPVPVSETNESSIVERTPFSSSSSSKHSSPSGTVAARVTPFNYNPSPRKSSADSTSARPSQIPTPVNNNTKKRDSKTDSTESSGTQSPKRHSGSYLVTSV

SEQ ID NO: 239 - protein, 2742 aa, Homo sapiens
MAAASYDQLLKQVEALKMENSNLRQELEDNSNHLTKLETEASNMKEVLKQLQGSIEDEAMASSGQIDLLERLKELNLDSSNFPGVKLRSKMSLRSYGSREGSVSSRSGECSPVPMGSFPRRGFVNGSRESTGYLEELEKERSLLLADLDKEEKEKDWYYAQLQNLTKRIDSLPLTENFSLQTDMTRRQLEYEARQIRVAMEEQLGTCQDMEKRAQRRIARIQQIEKDILRIRQLLQSQATEAERSSQNKHETGSHDAERQNEGQGVGEINMATSGNGQGSTTRMDHETASVLSSSSTHSAPRRLTSHLGTKIRAYCETCWEWQEAHEPGMDQDKNPMPAPVEHQICPAVCVLMKLSFDEEHRHAMNELGGLQAIAELLQVDCEMYGLTNDHYSITLRRYAGMALTNLTFGDVANKATLCSMKGCMRALVAQLKSESEDLQQVIASVLRNLSWRADVNSKKTLREVGSVKALMECALEVKKESTLKSVLSALWNLSAHCTENKADICAVDGALAFLVGTLTYRSQTNTLAIIESGGGILRNVSSLIATNEDHRQILRENNCLQTLLQHLKSHSLTIVSNACGTLWNLSARNPKDQEALWDMGAVSMLKNLIHSKHKMIAMGSAAALRNLMANRPAKYKDANIMSPGSSLPSLHVRKQKALEAELDAQHLSETFDNIDNLSPKASHRSKQRHKQSLYGDYVFDTNRHDDNRSDNFNTGNMTVLSPYLNTTVLPSSSSSRGSLDSSRSEKDRSLERERGIGLGNYHPATENPGTSSKRGLQISTTAAQIAKVMEEVSAIHTSQEDRSSGSTTELHCVTDERNALRRSSAAHTHSNTYNFTKSENSNRTCSMPYAKLEYKRSSNDSLNSVSSSDGYGKRGQMKPSIESYSEDDESKFCSYGQYPADLAHKIHSANHMDDNDGELDTPINYSLKYSDEQLNSGRQSPSQNERWARPKHIIEDEIKQSEQRQSRNQSTTYPVYTESTDDKHLKFQPHFGQQECVSPYRSRGANGSETNRVGSNHGINQNVSQSLCQEDDYEDDKPTNYSERYSEEEQHEEEERPTNYSIKYNEEKRHVDQPIDYSLKYATDIPSSQKQSFSFSKSSSGQSSKTEHMSSSSENTSTPSSNAKRQNQLHPSSAQSRSGQPQKAATCKVSSINQETIQTYCVEDTPICFSRCSSLSSLSSAEDEIGCNQTTQEADSANTLQIAEIKEKIGTRSAEDPVSEVPAVSQHPRTKSSRLQGSSLSSESARHKAVEFSSGAKSPSKSGAQTPKSPPEHYVQETPLMFSRCTSVSSLDSFESRSIASSVQSEPCSGMVSGIISPSDLPDSPGQTMPPSRSKTPPPPPQTAQTKREVPKNKAPTAEKRESGPKQAAVNAAVQRVQVLPDADTLLHFATESTPDGFSCSSSLSALSLDEPFIQKDVELRIMPPVQENDNGNETESEQPKESNENQEKEAEKTIDSEKDLLDDSDDDDIEILEECIISAMPTKSSRKAKKPAQTASKLPPPVARKPSQLPVYKLLPSQNRLQPQKHVSFTPGDDMPRVYCVEGTPINFSTATSLSDLTIESPPNELAAGEGVRGGAQSGEFEKRDTIPTEGRSTDEAQGGKTSSVTIPELDDNKAEEGDILAECINSAMPKGKSHKPFRVKKIMDQVQQASASSSAPNKNQLDGKKKKPTSPVKPIPQNTEYRTRVRKNADSKNNLNAERVFSDNKDSKKQNLKNNSKVFNDKLPNNEDRVRGSFAFDSPHHYTPIEGTPYCFSRNDSLSSLDFDDDDVDLSREKAELRKAKENKESEAKVTSHTELTSNQQSANKTQAIAKQPINRGQPKPILQKQSTFPQSSKDIPDRGAATDEKLQNFAIENTPVCFSHNSSLSSLSDIDQENNNKENEPIKETEPPDSQGEPSKPQASGYAPKSFHVEDTPVCFSRNSSLSSLSIDSEDDLLQECISSAMPKKKKPSRLKGDNEKHSPRNMGGILGEDLTLDLKDIQRPDSEHGLSPDSENFDWKAIQEGANSIVSSLHQAAAAACLSRQASSDSDSILSLKSGISLGSPFHLTPDQEEKPFTSNKGPRILKPGEKSTLETKKIESESKGIKGGKKVYKSLITGKVRSNSEISGQMKQPLQANMPSISRGRTMIHIPGVRNSSSSTSPVSKKGPPLKTPASKSPSEGQTATTSPRGAKPSVKSELSPVARQTSQIGGSSKAPSRSGSRDSTPSRPAQQPLSRPIQSPGRNSISPGRNGISPPNKLSQLPRTSSPSTASTKSSGSGKMSYTSPGRQMSQQNLTKQTGLSKNASSIPRSESASKGLNQMNNGNGANKKVELSRMSSTKSSGSESDRSERPVLVRQSTFIKEAPSPTLRRKLEESASFESLSPSSRPASPTRSQAQTPVLSPSLPDMSLSTHSSVQAGGWRKLPPNLSPTIEYNDGRPAKRHDIARSHSESPSRLPINRSGTWKREHSKHSSSLPRVSTWRRTGSSSSILSASSESSEKAKSEDEKHVNSISGTKQSKENQVSAKGTWRKIKENEFSPTNSTSQTVSSGATNGAESKTLIYQMAPAVSKTEDVWVRIEDCPINNPRSGRSPTGNTPPVIDSVSEKANPNIKDSKDNQAKQNVGNGSVPMRTVGLENRLNSFIQVDAPDQKGTEIKPGQNNPVPVSETNESSIVERTPFSSSSSSKHSSPSGTVAARVTPFNYNPSPRKSSADSTSARPSQIPTPVNNNTKKRDSKTDSTESSGTQSPKRHSGSYLVTSV

SEQ ID NO: 240 - protein, 2825 aa, Homo sapiens
MYASLGSGPVAPLPASVPPSVLGSWSTGGSRSCVRQETKSPGGARTSGHWASVWQEVLKQLQGSIEDEAMASSGQIDLLERLKELNLDSSNFPGVKLRSKMSLRSYGSREGSVSSRSGECSPVPMGSFPRRGFVNGSRESTGYLEELEKERSLLLADLDKEEKEKDWYYAQLQNLTKRIDSLPLTENFSLQTDMTRRQLEYEARQIRVAMEEQLGTCQDMEKRAQRSSQNKHETGSHDAERQNEGQGVGEINMATSGNGQGSTTRMDHETASVLSSSSTHSAPRRLTSHLGTKVEMVYSLLSMLGTHDKDDMSRTLLAMSSSQDSCISMRQSGCLPLLIQLLHGNDKDSVLLGNSRGSKEARARASAALHNIIHSQPDDKRGRREIRVLHLLEQIRAYCETCWEWQEAHEPGMDQDKNPMPAPVEHQICPAVCVLMKLSFDEEHRHAMNELGGLQAIAELLQVDCEMYGLTNDHYSITLRRYAGMALTNLTFGDVANKATLCSMKGCMRALVAQLKSESEDLQQVIASVLRNLSWRADVNSKKTLREVGSVKALMECALEVKKESTLKSVLSALWNLSAHCTENKADICAVDGALAFLVGTLTYRSQTNTLAIIESGGGILRNVSSLIATNEDHRQILRENNCLQTLLQHLKSHSLTIVSNACGTLWNLSARNPKDQEALWDMGAVSMLKNLIHSKHKMIAMGSAAALRNLMANRPAKYKDANIMSPGSSLPSLHVRKQKALEAELDAQHLSETFDNIDNLSPKASHRSKQRHKQSLYGDYVFDTNRHDDNRSDNFNTGNMTVLSPYLNTTVLPSSSSSRGSLDSSRSEKDRSLERERGIGLGNYHPATENPGTSSKRGLQISTTAAQIAKVMEEVSAIHTSQEDRSSGSTTELHCVTDERNALRRSSAAHTHSNTYNFTKSENSNRTCSMPYAKLEYKRSSNDSLNSVSSSDGYGKRGQMKPSIESYSEDDESKFCSYGQYPADLAHKIHSANHMDDNDGELDTPINYSLKYSDEQLNSGRQSPSQNERWARPKHIIEDEIKQSEQRQSRNQSTTYPVYTESTDDKHLKFQPHFGQQECVSPYRSRGANGSETNRVGSNHGINQNVSQSLCQEDDYEDDKPTNYSERYSEEEQHEEEERPTNYSIKYNEEKRHVDQPIDYSLKYATDIPSSQKQSFSFSKSSSGQSSKTEHMSSSSENTSTPSSNAKRQNQLHPSSAQSRSGQPQKAATCKVSSINQETIQTYCVEDTPICFSRCSSLSSLSSAEDEIGCNQTTQEADSANTLQIAEIKEKIGTRSAEDPVSEVPAVSQHPRTKSSRLQGSSLSSESARHKAVEFSSGAKSPSKSGAQTPKSPPEHYVQETPLMFSRCTSVSSLDSFESRSIASSVQSEPCSGMVSGIISPSDLPDSPGQTMPPSRSKTPPPPPQTAQTKREVPKNKAPTAEKRESGPKQAAVNAAVQRVQVLPDADTLLHFATESTPDGFSCSSSLSALSLDEPFIQKDVELRIMPPVQENDNGNETESEQPKESNENQEKEAEKTIDSEKDLLDDSDDDDIEILEECIISAMPTKSSRKAKKPAQTASKLPPPVARKPSQLPVYKLLPSQNRLQPQKHVSFTPGDDMPRVYCVEGTPINFSTATSLSDLTIESPPNELAAGEGVRGGAQSGEFEKRDTIPTEGRSTDEAQGGKTSSVTIPELDDNKAEEGDILAECINSAMPKGKSHKPFRVKKIMDQVQQASASSSAPNKNQLDGKKKKPTSPVKPIPQNTEYRTRVRKNADSKNNLNAERVFSDNKDSKKQNLKNNSKVFNDKLPNNEDRVRGSFAFDSPHHYTPIEGTPYCFSRNDSLSSLDFDDDDVDLSREKAELRKAKENKESEAKVTSHTELTSNQQSANKTQAIAKQPINRGQPKPILQKQSTFPQSSKDIPDRGAATDEKLQNFAIENTPVCFSHNSSLSSLSDIDQENNNKENEPIKETEPPDSQGEPSKPQASGYAPKSFHVEDTPVCFSRNSSLSSLSIDSEDDLLQECISSAMPKKKKPSRLKGDNEKHSPRNMGGILGEDLTLDLKDIQRPDSEHGLSPDSENFDWKAIQEGANSIVSSLHQAAAAACLSRQASSDSDSILSLKSGISLGSPFHLTPDQEEKPFTSNKGPRILKPGEKSTLETKKIESESKGIKGGKKVYKSLITGKVRSNSEISGQMKQPLQANMPSISRGRTMIHIPGVRNSSSSTSPVSKKGPPLKTPASKSPSEGQTATTSPRGAKPSVKSELSPVARQTSQIGGSSKAPSRSGSRDSTPSRPAQQPLSRPIQSPGRNSISPGRNGISPPNKLSQLPRTSSPSTASTKSSGSGKMSYTSPGRQMSQQNLTKQTGLSKNASSIPRSESASKGLNQMNNGNGANKKVELSRMSSTKSSGSESDRSERPVLVRQSTFIKEAPSPTLRRKLEESASFESLSPSSRPASPTRSQAQTPVLSPSLPDMSLSTHSSVQAGGWRKLPPNLSPTIEYNDGRPAKRHDIARSHSESPSRLPINRSGTWKREHSKHSSSLPRVSTWRRTGSSSSILSASSESSEKAKSEDEKHVNSISGTKQSKENQVSAKGTWRKIKENEFSPTNSTSQTVSSGATNGAESKTLIYQMAPAVSKTEDVWVRIEDCPINNPRSGRSPTGNTPPVIDSVSEKANPNIKDSKDNQAKQNVGNGSVPMRTVGLENRLNSFIQVDAPDQKGTEIKPGQNNPVPVSETNESSIVERTPFSSSSSSKHSSPSGTVAARVTPFNYNPSPRKSSADSTSARPSQIPTPVNNNTKKRDSKTDSTESSGTQSPKRHSGSYLVTSV

SEQ ID NO: 241 - protein, 743 aa, Homo sapiens
MNNPSETSKPSMESGDGNTGTQTNGLDFQKQPVPVGGAISTAQAQAFLGHLHQVQLAGTSLQAAAQSLNVQSKSNEESGDSQQPSQPSQQPSVQAAIPQTQLMLAGGQITGLTLTPAQQQLLLQQAQAQAQLLAAAVQQHSASQQHSAAGATISASAATPMTQIPLSQPIQIAQDLQQLQQLQQQNLNLQQFVLVHPTTNLQPAQFIISQTPQGQQGLLQAQNLLTQLPQQSQANLLQSQPSITLTSQPATPTRTIAATPIQTLPQSQSTPKRIDTPSLEEPSDLEELEQFAKTFKQRRIKLGFTQGDVGLAMGKLYGNDFSQTTISRFEALNLSFKNMCKLKPLLEKWLNDAENLSSDSSLSSPSALNSPGIEGLSRRRKKRTSIETNIRVALEKSFLENQKPTSEEITMIADQLNMEKEVIRVWFCNRRQKEKRINPPSSGGTSSSPIKAIFPSPTSLVATTPSLVTSSAATTLTVSPVLPLTSAAVTNLSVTGTSDTTSNNTATVISTAPPASSAVTSPSLSPSPSASASTSEASSASETSTTQTTSTPLSSPLGTSQVMVTASGLQTAAAAALQGAAQLPANASLAAMAAAAGLNPSLMAPSQFAAGGALLSLNPGTLSGALSPALMSNSTLATIQALASGGSLPITSLDATGNLVFANAGGAPNIVTAPLFLNPQNLSLLTSNPVSLVSAAAASAGNSAPVASLHATSTSAESIQNSLFTVASASGAASTTTTASKAQ

SEQ ID NO: 242 - protein, 755 aa, Homo sapiens
MLDCSDYVLDSRMNNPSETSKPSMESGDGNTGTQTNGLDFQKQPVPVGGAISTAQAQAFLGHLHQVQLAGTSLQAAAQSLNVQSKSNEESGDSQQPSQPSQQPSVQAAIPQTQLMLAGGQITGLTLTPAQQQLLLQQAQAQAQLLAAAVQQHSASQQHSAAGATISASAATPMTQIPLSQPIQIAQDLQQLQQLQQQNLNLQQFVLVHPTTNLQPAQFIISQTPQGQQGLLQAQNLLTQLPQQSQANLLQSQPSITLTSQPATPTRTIAATPIQTLPQSQSTPKRIDTPSLEEPSDLEELEQFAKTFKQRRIKLGFTQGDVGLAMGKLYGNDFSQTTISRFEALNLSFKNMCKLKPLLEKWLNDAENLSSDSSLSSPSALNSPGIEGLSRRRKKRTSIETNIRVALEKSFLENQKPTSEEITMIADQLNMEKEVIRVWFCNRRQKEKRINPPSSGGTSSSPIKAIFPSPTSLVATTPSLVTSSAATTLTVSPVLPLTSAAVTNLSVTGTSDTTSNNTATVISTAPPASSAVTSPSLSPSPSASASTSEASSASETSTTQTTSTPLSSPLGTSQVMVTASGLQTAAAAALQGAAQLPANASLAAMAAAAGLNPSLMAPSQFAAGGALLSLNPGTLSGALSPALMSNSTLATIQALASGGSLPITSLDATGNLVFANAGGAPNIVTAPLFLNPQNLSLLTSNPVSLVSAAAASAGNSAPVASLHATSTSAESIQNSLFTVASASGAASTTTTASKAQ

SEQ ID NO: 243 - protein, 741 aa, Homo sapiens
MKTRMKIFVMIHFHLMNSTQTNGLDFQKQPVPVGGAISTAQAQAFLGHLHQVQLAGTSLQAAAQSLNVQSKSNEESGDSQQPSQPSQQPSVQAAIPQTQLMLAGGQITGLTLTPAQQQLLLQQAQAQAQLLAAAVQQHSASQQHSAAGATISASAATPMTQIPLSQPIQIAQDLQQLQQLQQQNLNLQQFVLVHPTTNLQPAQFIISQTPQGQQGLLQAQNLLTQLPQQSQANLLQSQPSITLTSQPATPTRTIAATPIQTLPQSQSTPKRIDTPSLEEPSDLEELEQFAKTFKQRRIKLGFTQGDVGLAMGKLYGNDFSQTTISRFEALNLSFKNMCKLKPLLEKWLNDAENLSSDSSLSSPSALNSPGIEGLSRRRKKRTSIETNIRVALEKSFLENQKPTSEEITMIADQLNMEKEVIRVWFCNRRQKEKRINPPSSGGTSSSPIKAIFPSPTSLVATTPSLVTSSAATTLTVSPVLPLTSAAVTNLSVTGTSDTTSNNTATVISTAPPASSAVTSPSLSPSPSASASTSEASSASETSTTQTTSTPLSSPLGTSQVMVTASGLQTAAAAALQGAAQLPANASLAAMAAAAGLNPSLMAPSQFAAGGALLSLNPGTLSGALSPALMSNSTLATIQALASGGSLPITSLDATGNLVFANAGGAPNIVTAPLFLNPQNLSLLTSNPVSLVSAAAASAGNSAPVASLHATSTSAESIQNSLFTVASASGAASTTTTASKAQ

SEQ ID NO: 244 - protein, 766 aa, Homo sapiens
MADGGAASQDESSAAAAAAADSRMNNPSETSKPSMESGDGNTGTQTNGLDFQKQPVPVGGAISTAQAQAFLGHLHQVQLAGTSLQAAAQSLNVQSKSNEESGDSQQPSQPSQQPSVQAAIPQTQLMLAGGQITGLTLTPAQQQLLLQQAQAQAQLLAAAVQQHSASQQHSAAGATISASAATPMTQIPLSQPIQIAQDLQQLQQLQQQNLNLQQFVLVHPTTNLQPAQFIISQTPQGQQGLLQAQNLLTQLPQQSQANLLQSQPSITLTSQPATPTRTIAATPIQTLPQSQSTPKRIDTPSLEEPSDLEELEQFAKTFKQRRIKLGFTQGDVGLAMGKLYGNDFSQTTISRFEALNLSFKNMCKLKPLLEKWLNDAENLSSDSSLSSPSALNSPGIEGLSRRRKKRTSIETNIRVALEKSFLENQKPTSEEITMIADQLNMEKEVIRVWFCNRRQKEKRINPPSSGGTSSSPIKAIFPSPTSLVATTPSLVTSSAATTLTVSPVLPLTSAAVTNLSVTGTSDTTSNNTATVISTAPPASSAVTSPSLSPSPSASASTSEASSASETSTTQTTSTPLSSPLGTSQVMVTASGLQTAAAAALQGAAQLPANASLAAMAAAAGLNPSLMAPSQFAAGGALLSLNPGTLSGALSPALMSNSTLATIQALASGGSLPITSLDATGNLVFANAGGAPNIVTAPLFLNPQNLSLLTSNPVSLVSAAAASAGNSAPVASLHATSTSAESIQNSLFTVASASGAASTTTTASKAQ

SEQ ID NO: 245 - protein, 653 aa, Homo sapiens
MNNPSETSKPSMESGDGNTGTQTNGLDFQKQPVPVGGAISTAQAQAFLGHLHQVQLAGTSLQAAAQSLNVQSKSNEESGDSQQPSQPSQQPSVQAAIPQTQLMLAGGQITGLTLTPAQQQLLLQQAQAQAQLLAAAVQQHSASQQHSAAGATISASAATPMTQIPLSQPIQIAQDLQQLQQLQQQNLNLQQFVLVHPTTNLQPAQFIISQTPQGQQGLLQAQNLLTQLPQQSQANLLQSQPSITLTSQPATPTRTIAATPIQTLPQSQSTPKRIDTPSLEEPSDLEELEQFAKTFKQRRIKLGFTQGDVGLAMGKLYGNDFSQTTISRFEALNLSFKNMCKLKPLLEKWLNDAENLSSDSSLSSPSALNSPGIEGLSRRRKKRTSIETNIRVALEKSFLENQKPTSEEITMIADQLNMEKEVIRVWFCNRRQKEKRINPPSSGGTSSSPIKAIFPSPTSLVATTPSLVTSSAATTLTVSPVLPLTSAAVTNLSVTGTSDTTSNNTATVISTAPPASSAVTSPSLSPSPSASASTSEASSASETSTTQTTSTPLSSPLGTSQVMVTASGLQTAAAAALQGAAQLPANASLAAMAAAAGLNPSLMAPSQFAAGGALLSLNPGTLSGALSPALMSNSTLATIQGLLHGLENFLTKN

SEQ ID NO: 246 - protein, 703 aa, Homo sapiens
MADGGAASQDESSAAAAAAADSRMNNPSETSKPSMESGDGNTGTQTNGLDFQKQPVPVGGAISTAQAQAFLGHLHQVQLAGTSLQAAAQSLNVQSKSNEESGDSQQPSQPSQQPSVQAAIPQTQLMLAGGQITGDLQQLQQLQQQNLNLQQFVLVHPTTNLQPAQFIISQTPQGQQGLLQAQNLLTQLPQQSQANLLQSQPSITLTSQPATPTRTIAATPIQTLPQSQSTPKRIDTPSLEEPSDLEELEQFAKTFKQRRIKLGFTQGDVGLAMGKLYGNDFSQTTISRFEALNLSFKNMCKLKPLLEKWLNDAENLSSDSSLSSPSALNSPGIEGLSRRRKKRTSIETNIRVALEKSFLENQKPTSEEITMIADQLNMEKEVIRVWFCNRRQKEKRINPPSSGGTSSSPIKAIFPSPTSLVATTPSLVTSSAATTLTVSPVLPLTSAAVTNLSVTGTSDTTSNNTATVISTAPPASSAVTSPSLSPSPSASASTSEASSASETSTTQTTSTPLSSPLGTSQVMVTASGLQTAAAAALQGAAQLPANASLAAMAAAAGLNPSLMAPSQFAAGGALLSLNPGTLSGALSPALMSNSTLATIQALASGGSLPITSLDATGNLVFANAGGAPNIVTAPLFLNPQNLSLLTSNPVSLVSAAAASAGNSAPVASLHATSTSAESIQNSLFTVASASGAASTTTTASKAQ

SEQ ID NO: 247 - protein, 388 aa, Homo sapiens
MSAPSTLPPGGEEGLGTAWPSAANASSAPAEAEEAVAGPGDARAAGMVAIQCIYALVCLVGLVGNALVIFVILRYAKMKTATNIYLLNLAVADELFMLSVPFVASSAALRHWPFGSVLCRAVLSVDGLNMFTSVFCLTVLSVDRYVAVVHPLRAATYRRPSVAKLINLGVWLASLLVTLPIAIFADTRPARGGQAVACNLQWPHPAWSAVFVVYTFLLGFLLPVLAIGLCYLLIVGKMRAVALRAGWQQRRRSEKKITRLVLMVVVVFVLCWMPFYVVQLLNLFVTSLDATVNHVSLILSYANSCANPILYGFLSDNFRRFFQRVLCLRCCLLEGAGGAEEEPLDYYATALKSKGGAGCMCPPLPCQQEALQPEPGRKRIPLTRTTTF

SEQ ID NO: 248 - protein, 790 aa, Homo sapiens
MAEQVLPQALYLSNMRKAVKIRERTPEDIFKPTNGIIHHFKTMHRYTLEMFRTCQFCPQFREIIHKALIDRNIQATLESQKKLNWCREVRKLVALKTNGDGNCLMHATSQYMWGVQDTDLVLRKALFSTLKETDTRNFKFRWQLESLKSQEFVETGLCYDTRNWNDEWDNLIKMASTDTPMARSGLQYNSLEEIHIFVLCNILRRPIIVISDKMLRSLESGSNFAPLKVGGIYLPLHWPAQECYRYPIVLGYDSHHFVPLVTLKDSGPEIRAVPLVNRDRGRFEDLKVHFLTDPENEMKEKLLKEYLMVIEIPVQGWDHGTTHLINAAKLDEANLPKEINLVDDYFELVQHEYKKWQENSEQGRREGHAQNPMEPSVPQLSLMDVKCETPNCPFFMSVNTQPLCHECSERRQKNQNKLPKLNSKPGPEGLPGMALGASRGEAYEPLAWNPEESTGGPHSAPPTAPSPFLFSETTAMKCRSPGCPFTLNVQHNGFCERCHNARQLHASHAPDHTRHLDPGKCQACLQDVTRTFNGICSTCFKRTTAEASSSLSTSLPPSCHQRSKSDPSRLVRSPSPHSCHRAGNDAPAGCLSQAARTPGDRTGTSKCRKAGCVYFGTPENKGFCTLCFIEYRENKHFAAASGKVSPTASRFQNTIPCLGRECGTLGSTMFEGYCQKCFIEAQNQRFHEAKRTEEQLRSSQRRDVPRTTQSTSRPKCARASCKNILACRSEELCMECQHPNQRMGPGAHRGEPAPEDPPKQRCRAPACDHFGNAKCNGYCNECFQFKQMYG

SEQ ID NO: 249 - protein, 498 aa, Homo sapiens
MDFSVKVDIEKEVTCPICLELLTEPLSLDCGHSFCQACITAKIKESVIISRGESSCPVCQTRFQPGNLRPNRHLANIVERVKEVKMSPQEGQKRDVCEHHGKKLQIFCKEDGKVICWVCELSQEHQGHQTFRINEVVKECQEKLQVALQRLIKEDQEAEKLEDDIRQERTAWKNYIQIERQKILKGFNEMRVILDNEEQRELQKLEEGEVNVLDNLAAATDQLVQQRQDASTLISDLQRRLRGSSVEMLQDVIDVMKRSESWTLKKPKSVSKKLKSVFRVPDLSGMLQVLKELTDVQYYWVDVMLNPGSATSNVAISVDQRQVKTVRTCTFKNSNPCDFSAFGVFGCQYFSSGKYYWEVDVSGKIAWILGVHSKISSLNKRKSSGFAFDPSVNYSKVYSRYRPQYGYWVIGLQNTCEYNAFEDSSSSDPKVLTLFMAVPPCRIGVFLDYEAGIVSFFNVTNHGALIYKFSGCRFSRPAYPYFNPWNCLVPMTVCPPSS

SEQ ID NO: 250 - protein, 494 aa, Homo sapiens
MDFSVKVDIEKEVTCPICLELLTEPLSLDCGHSFCQACITAKIKESVIISRGESSCPVCQTRFQPGNLRPNRHLANIVERVKEVKMSPQEGQKRDVCEHHGKKLQIFCKEDGKVICWVCELSQEHQGHQTFRINEVVKECQEKLQVALQRLIKEDQEAEKLEDDIRQERTAWKIERQKILKGFNEMRVILDNEEQRELQKLEEGEVNVLDNLAAATDQLVQQRQDASTLISDLQRRLRGSSVEMLQDVIDVMKRSESWTLKKPKSVSKKLKSVFRVPDLSGMLQVLKELTDVQYYWVDVMLNPGSATSNVAISVDQRQVKTVRTCTFKNSNPCDFSAFGVFGCQYFSSGKYYWEVDVSGKIAWILGVHSKISSLNKRKSSGFAFDPSVNYSKVYSRYRPQYGYWVIGLQNTCEYNAFEDSSSSDPKVLTLFMAVPPCRIGVFLDYEAGIVSFFNVTNHGALIYKFSGCRFSRPAYPYFNPWNCLVPMTVCPPSS

SEQ ID NO: 251 - protein, 233 aa, Homo sapiens
MSTESMIRDVELAEEALPKKTGGPQGSRRCLFLSLFSFLIVAGATTLFCLLHFGVIGPQREEFPRDLSLISPLAQAVRSSSRTPSDKPVAHVVANPQAEGQLQWLNRRANALLANGVELRDNQLVVPSEGLYLIYSQVLFKGQGCPSTHVLLTHTISRIAVSYQTKVNLLSAIKSPCQRETPEGAEAKPWYEPIYLGGVFQLEKGDRLSAEINRPDYLDFAESGQVYFGIIAL

SEQ ID NO: 252 - protein, 205 aa, Homo sapiens
MTPPERLFLPRVCGTTLHLLLLGLLLVLLPGAQGLPGVGLTPSAAQTARQHPKMHLAHSTLKPAAHLIGDPSKQNSLLWRANTDRAFLQDGFSLSNNSLLVPTSGIYFVYSQVVFSGKAYSPKATSSPLYLAHEVQLFSSQYPFHVPLLSSQKMVYPGLQEPWLHSMYHGAAFQLTQGDQLSTHTDGIPHLVLSPSTVFFGAFAL

SEQ ID NO: 253 - protein, 253 aa, Homo sapiens
MHSWERLAVLVLLGAAACAAPPRGRILGGREAEAHARPYMASVQLNGAHLCGGVLVAEQWVLSAAHCLEDAADGKVQVLLGAHSLSQPEPSKRLYDVLRAVPHPDSQPDTIDHDLLLLQLSEKATLGPAVRPLPWQRVDRDVAPGTLCDVAGWGIVNHAGRRPDSLQHVLLPVLDRATCNRRTHHDGAITERLMCAESNRRDSCKGDSGGPLVCGGVLEGVVTSGSRVCGNRKKPGIYTRVASYAAWIDSVLA

SEQ ID NO: 254 - protein, 228 aa, Homo sapiens
ILGGREAEAHARPYMASVQLNGAHLCGGVLVAEQWVLSAAHCLEDAADGKVQVLLGAHSLSQPEPSKRLYDVLRAVPHPDSQPDTIDHDLLLLQLSEKATLGPAVRPLPWQRVDRDVAPGTLCDVAGWGIVNHAGRRPDSLQHVLLPVLDRATCNRRTHHDGAITERLMCAESNRRDSCKGDSGGPLVCGGVLEGVVTSGSRVCGNRKKPGIYTRVASYAAWIDSVLA

SEQ ID NO: 255 - protein, 260 aa, Homo sapiens
MHSWERLAVLVLLGAAACGEEAWAWAAPPRGRILGGREAEAHARPYMASVQLNGAHLCGGVLVAEQWVLSAAHCLEDAADGKVQVLLGAHSLSQPEPSKRLYDVLRAVPHPDSQPDTIDHDLLLLQLSEKATLGPAVRPLPWQRVDRDVAPGTLCDVAGWGIVNHAGRRPDSLQHVLLPVLDRATCNRRTHHDGAITERLMCAESNRRDSCKGDSGGPLVCGGVLEGVVTSGSRVCGNRKKPGIYTRVASYAAWIDSVLA

SEQ ID NO: 256 - protein, 210 aa, Homo sapiens
MLPLPSCSLPILLLFLLPSVPIESQPPPSTLPPFLAPEWDLLSPRVVLSRGAPAGPPLLFLLEAGAFRESAGAPANRSRRGVSETAPASRRGELAVCDAVSGWVTDRRTAVDLRGREVEVLGEVPAAGGSPLRQYFFETRCKADNAEEGGPGAGGGGCRGVDRRHWVSECKAKQSYVRALTADAQGRVGWRWIRIDTACVCTLLSRTGRA

SEQ ID NO: 257 - protein, 130 aa, Homo sapiens
GVSETAPASRRGELAVCDAVSGWVTDRRTAVDLRGREVEVLGEVPAAGGSPLRQYFFETRCKADNAEEGGPGAGGGGCRGVDRRHWVSECKAKQSYVRALTADAQGRVGWRWIRIDTACVCTLLSRTGRA

SEQ ID NO: 258 - protein, 143 aa, Homo sapiens
MLPLPSCSLPILLLFLLPSVPIESQPPPSTLPPFLAPEWDLLSPRVVLSRGAPAGPPLLFLLEAGAFRESAGAPANRSRRGVSETAPASRRGELAVCDAVSGWVTDRRTAVDLRGREVEVLGEVPAAGGSPLRQYFFETRCKA

SEQ ID NO: 259 - protein, 259 aa, Homo sapiens
MSEVPVARVWLVLLLLTVQVGVTAGAPWQCAPCSAEKLALCPPVSASCSEVTRSAGCGCCPMCALPLGAACGVATARCARGLSCRALPGEQQPLHALTRGQGACVQESDASAPHAAEAGSPESPESTEITEEELLDNFHLMAPSEEDHSILWDAISTYDGSKALHVTNIKKWKEPCRIELYRVVESLAKAQETSGEEISKFYLPNCNKNGFYHSRQCETSMDGEAGLCWCVYPWNGKRIPGSPEIRGDPNCQIYFNVQN

SEQ ID NO: 260 - protein, 234 aa, Homo sapiens
APWQCAPCSAEKLALCPPVSASCSEVTRSAGCGCCPMCALPLGAACGVATARCARGLSCRALPGEQQPLHALTRGQGACVQESDASAPHAAEAGSPESPESTEITEEELLDNFHLMAPSEEDHSILWDAISTYDGSKALHVTNIKKWKEPCRIELYRVVESLAKAQETSGEEISKFYLPNCNKNGFYHSRQCETSMDGEAGLCWCVYPWNGKRIPGSPEIRGDPNCQIYFNVQN

SEQ ID NO: 261 - protein, 216 aa, Homo sapiens
MSEVPVARVWLVLLLLTVQVGVTAGAPWQCAPCSAEKLALCPPVSASCSEVTRSAGCGCCPMCALPLGAACGVATARCARGLSCRALPGEQQPLHALTRGQGACVQESDASAPHAAEAGSPESPESTEITEEELLDNFHLMAPSEEDHSILWDAISTYDGSKALHVTNIKKWKCETSMDGEAGLCWCVYPWNGKRIPGSPEIRGDPNCQIYFNVQN

SEQ ID NO: 262 - protein, 257 aa, Homo sapiens
MSEVPVARVWLVLLLLTVQVGVTAGAPWQCAPCSAEKLALCPPVSASCSEVTRSAGCGCCPMCALPLGAACGVATARCARGLSCRALPGEQQPLHALTRGQGACVQESDASAPHAAEAGSPESPESTEITEEELLDNFHLMAPSEEDHSILWDAISTYDGSKALHVTNIKKWKEPCRIELYRVVESLAKAQETSGEEISKFYLPNCNKNGFYHSRQTSMDGEAGLCWCVYPWNGKRIPGSPEIRGDPNCQIYFNVQN

SEQ ID NO: 263 - protein, 98 aa, Homo sapiens
MMCGAPSATQPATAETQHIADQVRSQLEEKENKKFPVFKAVSFKSQVVAGTNYFIKVHVGDEDFVHLRVFQSLPHENKPLTLSNYQTNKAKHDELTYF

SEQ ID NO: 264 - protein, 54 aa, Homo sapiens
  misc_feature (1)..(1): Xaa can be any naturally occurring amino acid
XATAETQHIADQVHVGDEDFVHLRVFQSLPHENKPLTLSNYQTNKAKHDELTYF

SEQ ID NO: 265 - protein, 83 aa, Homo sapiens
MMCGAPSATQPATAETQHIADQVRSQLEEKENKKFPVFKAVSFKSQVVAGTNYFIKVECGPQEGLPRTGAGRKPPVQARAVWS

SEQ ID NO: 266 - protein, 194 aa, Homo sapiens
MTMRHNWTPDLSPLWVLLLCAHVVTLLVRATPVSQTTTAATASVRSTKDPCPSQPPVFPAAKQCPALEVTWPEVEVPLNGTLSLSCVACSRFPNFSILYWLGNGSFIEHLPGRLWEGSTSRERGSTGTQLCKALVLEQLTPALHSTNFSCVLVDPEQVVQRHVVLAQLWAGLRATLPPTQEALPSSHSSPQQQG

SEQ ID NO: 267 - protein, 164 aa, Homo sapiens
TPVSQTTTAATASVRSTKDPCPSQPPVFPAAKQCPALEVTWPEVEVPLNGTLSLSCVACSRFPNFSILYWLGNGSFIEHLPGRLWEGSTSRERGSTGTQLCKALVLEQLTPALHSTNFSCVLVDPEQVVQRHVVLAQLWAGLRATLPPTQEALPSSHSSPQQQG

SEQ ID NO: 268 - protein, 115 aa, Homo sapiens
MTMRHNWTPDLSPLWVLLLCAHVVTLLVRATPVSQTTTAATASVRSTKDPCPSQPPVFPAAKQCPALEVTWPEVEVPLSWAEGNLAPHPRSPALQPQQSTAAGLRLSTGPAAAQP

SEQ ID NO: 269 - protein, 163 aa, Homo sapiens
MTMRHNWTPDLSPLWVLLLCAHVVTLLVRATPVSQTTTAATASVRSTKDPCPSQPPVFPAAKQCPALEVTWPEVEVPLNGTLSLSCVACSRFPNFSILYWLGNGSFIEHLPGRLWEGSTSRERGSTGWAEGNLAPHPRSPALQPQQSTAAGLRLSTGPAAAQP

SEQ ID NO: 270 - protein, 199 aa, Homo sapiens
MTMRHNWTPDLSPLWVLLLCAHVVTLLVRATPVSQTTTAATASVRSTKDPCPSQPPVFPAAKQCPALEVTWPEVEVPLNGTLSLSCVACSRFPNFSILYWLGNGSFIEHLPGRLWEGSTSRERGSTGTQLCKALVLEQLTPALHSTNFSCVLVDPEQVVQRHVVLAQLWVRSPRRGLQEQEELCFHMWGGKGGLCQSSL

SEQ ID NO: 271 - protein, 124 aa, Homo sapiens
MPACRLGPLAAALLLSLLLFGFTLVSGTGAEKTGVCPELQADQNCTQECVSDSECADNLKCCSAGCATFCSLPNDKEGSCPQVNINFPQLGLCRDQCQVDSQCPGQMKCCRNGCGKVSCVTPNF

SEQ ID NO: 272 - protein, 94 aa, Homo sapiens
EKTGVCPELQADQNCTQECVSDSECADNLKCCSAGCATFCSLPNDKEGSCPQVNINFPQLGLCRDQCQVDSQCPGQMKCCRNGCGKVSCVTPNF

SEQ ID NO: 273 - protein, 73 aa, Homo sapiens
MLQVQVNLPVSPLPTYPYSFFYPDKEGSCPQVNINFPQLGLCRDQCQVDSQCPGQMKCCRNGCGKVSCVTPNF

SEQ ID NO: 274 - protein, 76 aa, Homo sapiens
MPACRLGPLAAALLLSLLLFGFTLVSDKEGSCPQVNINFPQLGLCRDQCQVDSQCPGQMKCCRNGCGKVSCVTPNF

SEQ ID NO: 275 - protein, 80 aa, Homo sapiens
MPACRLGPLAAALLLSLLLFGFTLVSGTGAEKTGVCPELQADQNCTQECVSDSECADNLKCCSAGCATFCLLCPNGQLAE

SEQ ID NO: 276 - protein, 102 aa, Homo sapiens
MPACRLGPLAAALLLSLLLFGFTLVSGTGAEKTGVCPELQADQNCTQECVSDSECADNLKCCSAGCATFCSLPNALFHWHLKTRRLWEISGPRPRRPTWDSS

SEQ ID NO: 277 - protein, 406 aa, Homo sapiens
MSALGAVIALLLWGQLFAVDSGNDVTDIADDGCPKPPEIAHGYVEHSVRYQCKNYYKLRTEGDGVYTLNDKKQWINKAVGDKLPECEADDGCPKPPEIAHGYVEHSVRYQCKNYYKLRTEGDGVYTLNNEKQWINKAVGDKLPECEAVCGKPKNPANPVQRILGGHLDAKGSFPWQAKMVSHHNLTTGATLINEQWLLTTAKNLFLNHSENATAKDIAPTLTLYVGKKQLVEIEKVVLHPNYSQVDIGLIKLKQKVSVNERVMPICLPSKDYAEVGRVGYVSGWGRNANFKFTDHLKYVMLPVADQDQCIRHYEGSTVPEKKTPKSPVGVQPILNEHTFCAGMSKYQEDTCYGDAGSAFAVHDLEEDTWYATGILSFDKSCAVAEYGVYVKVTSIQDWVQKTIAEN

SEQ ID NO: 278 - protein, 388 aa, Homo sapiens
VDSGNDVTDIADDGCPKPPEIAHGYVEHSVRYQCKNYYKLRTEGDGVYTLNDKKQWINKAVGDKLPECEADDGCPKPPEIAHGYVEHSVRYQCKNYYKLRTEGDGVYTLNNEKQWINKAVGDKLPECEAVCGKPKNPANPVQRILGGHLDAKGSFPWQAKMVSHHNLTTGATLINEQWLLTTAKNLFLNHSENATAKDIAPTLTLYVGKKQLVEIEKVVLHPNYSQVDIGLIKLKQKVSVNERVMPICLPSKDYAEVGRVGYVSGWGRNANFKFTDHLKYVMLPVADQDQCIRHYEGSTVPEKKTPKSPVGVQPILNEHTFCAGMSKYQEDTCYGDAGSAFAVHDLEEDTWYATGILSFDKSCAVAEYGVYVKVTSIQDWVQKTIAEN

SEQ ID NO: 279 - protein, 142 aa, Homo sapiens
VDSGNDVTDIADDGCPKPPEIAHGYVEHSVRYQCKNYYKLRTEGDGVYTLNDKKQWINKAVGDKLPECEADDGCPKPPEIAHGYVEHSVRYQCKNYYKLRTEGDGVYTLNNEKQWINKAVGDKLPECEAVCGKPKNPANPVQ

SEQ ID NO: 280 - protein, 245 aa, Homo sapiens
ILGGHLDAKGSFPWQAKMVSHHNLTTGATLINEQWLLTTAKNLFLNHSENATAKDIAPTLTLYVGKKQLVEIEKVVLHPNYSQVDIGLIKLKQKVSVNERVMPICLPSKDYAEVGRVGYVSGWGRNANFKFTDHLKYVMLPVADQDQCIRHYEGSTVPEKKTPKSPVGVQPILNEHTFCAGMSKYQEDTCYGDAGSAFAVHDLEEDTWYATGILSFDKSCAVAEYGVYVKVTSIQDWVQKTIAEN

SEQ ID NO: 281 - protein, 347 aa, Homo sapiens
MSALGAVIALLLWGQLFAVDSGNDVTDIADDGCPKPPEIAHGYVEHSVRYQCKNYYKLRTEGDGVYTLNNEKQWINKAVGDKLPECEAVCGKPKNPANPVQRILGGHLDAKGSFPWQAKMVSHHNLTTGATLINEQWLLTTAKNLFLNHSENATAKDIAPTLTLYVGKKQLVEIEKVVLHPNYSQVDIGLIKLKQKVSVNERVMPICLPSKDYAEVGRVGYVSGWGRNANFKFTDHLKYVMLPVADQDQCIRHYEGSTVPEKKTPKSPVGVQPILNEHTFCAGMSKYQEDTCYGDAGSAFAVHDLEEDTWYATGILSFDKSCAVAEYGVYVKVTSIQDWVQKTIAEN

SEQ ID NO: 282 - protein, 91 aa, Homo sapiens
MKLAVTLTLVTLALCCSSASAEICPSFQRVIETLLMDTPSSYEAAMELFSPDQDMREAGAQLKKLVDTLPQKPRESIIKLMEKIAQSSLCN

SEQ ID NO: 283 - protein, 70 aa, Homo sapiens
EICPSFQRVIETLLMDTPSSYEAAMELFSPDQDMREAGAQLKKLVDTLPQKPRESIIKLMEKIAQSSLCN

SEQ ID NO: 284 - protein, 56 aa, Homo sapiens
MDTPSSYEAAMELFSPDQDMREAGAQLKKLVDTLPQKPRESIIKLMEKIAQSSLCN

SEQ ID NO: 285 - protein, 383 aa, Homo sapiens
MGVKASQTGFVVLVLLQCCSAYKLVCYYTSWSQYREGDGSCFPDALDRFLCTHIIYSFANISNDHIDTWEWNDVTLYGMLNTLKNRNPNLKTLLSVGGWNFGSQRFSKIASNTQSRRTFIKSVPPFLRTHGFDGLDLAWLYPGRRDKQHFTTLIKEMKAEFIKEAQPGKKQLLLSAALSAGKVTIDSSYDIAKISQHLDFISIMTYDFHGAWRGTTGHHSPLFRGQEDASPDRFSNTDYAVGYMLRLGAPASKLVMGIPTFGRSFTLASSETGVGAPISGPGIPGRFTKEAGTLAYYEICDFLRGATVHRILGQQVPYATKGNQWVGYDDQESVKSKVQYLKDRQLAGAMVWALDLDDFQGSFCGQDLRFPLTNAIKDALAAT

SEQ ID NO: 286 - protein, 362 aa, Homo sapiens [sequence omitted]

SEQ ID NO: 287 - protein, 152 aa, Homo sapiens
  misc_feature (1)..(1): Xaa can be any naturally occurring amino acid
XLLLSAALSAGKVTIDSSYDIAKISQHLDFISIMTYDFHGAWRGTTGHHSPLFRGQEDASPDRFSNTICDFLRGATVHRILGQQVPYATKGNQWVGYDDQESVKSKVQYLKDRQLAGAMVWALDLDDFQGSFCGQDLRFPLTNAIKDALAAT

SEQ ID NO: 288 - protein, 117 aa, Homo sapiens
MRASSFLIVVVFLIAGTLVLEAAVTGVPVKGQDTVKGRVPFNGQDPVKGQVSVKGQDKVKAQEPVKGPVSTKPGSCPIILIRCAMLNPPNRCLKDTDCPGIKKCCEGSCGMACFVPQ

SEQ ID NO: 289 - protein, 38 aa, Homo sapiens
AVTGVPVKGQDTVKGRVPFNGQDPVKGQVSVKGQDKVK

SEQ ID NO: 290 - protein, 57 aa, Homo sapiens
AQEPVKGPVSTKPGSCPIILIRCAMLNPPNRCLKDTDCPGIKKCCEGSCGMACFVPQ

SEQ ID NO: 291 - protein, 757 aa, Homo sapiens
MVPDTACVLLLTLAALGASGQGQSPLGSDLGPQMLRELQETNAALQDVRELLRQQVREITFLKNTVMECDACGMQQSVRTGLPSVRPLLHCAPGFCFPGVACIQTESGARCGPCPAGFTGNGSHCTDVNECNAHPCFPRVRCINTSPGFRCEACPPGYSGPTHQGVGLAFAKANKQVCTDINECETGQHNCVPNSVCINTRGSFQCGPCQPGFVGDQASGCQRRAQRFCPDGSPSECHEHADCVLERDGSRSCVCAVGWAGNGILCGRDTDLDGFPDEKLRCPERQCRKDNCVTVPNSGQEDVDRDGIGDACDPDADGDGVPNEKDNCPLVRNPDQRNTDEDKWGDACDNCRSQKNDDQKDTDQDGRGDACDDDIDGDRIRNQADNCPRVPNSDQKDSDGDGIGDACDNCPQKSNPDQADVDHDFVGDACDSDQDQDGDGHQDSRDNCPTVPNSAQEDSDHDGQGDACDDDDDNDGVPDSRDNCRLVPNPGQEDADRDGVGDVCQDDFDADKVVDKIDVCPENAEVTLTDFRAFQTVVLDPEGDAQIDPNWVVLNQGREIVQTMNSDPGLAVGYTAFNGVDFEGTFHVNTVTDDDYAGFIFGYQDSSSFYVVMWKQMEQTYWQANPFRAVAEPGIQLKAVKSSTGPGEQLRNALWHTGDTESQVRLLWKDPRNVGWKDKKSYRWFLQHRPQVGYIRVRFYEGPELVADSNVVLDTTMRGGRLGVFCFSQENIIWANLRYRCNDTIPEDYETHQLRQA

SEQ ID NO: 292 - protein, 737 aa, Homo sapiens
QGQSPLGSDLGPQMLRELQETNAALQDVRELLRQQVREITFLKNTVMECDACGMQQSVRTGLPSVRPLLHCAPGFCFPGVACIQTESGARCGPCPAGFTGNGSHCTDVNECNAHPCFPRVRCINTSPGFRCEACPPGYSGPTHQGVGLAFAKANKQVCTDINECETGQHNCVPNSVCINTRGSFQCGPCQPGFVGDQASGCQRRAQRFCPDGSPSECHEHADCVLERDGSRSCVCAVGWAGNGILCGRDTDLDGFPDEKLRCPERQCRKDNCVTVPNSGQEDVDRDGIGDACDPDADGDGVPNEKDNCPLVRNPDQRNTDEDKWGDACDNCRSQKNDDQKDTDQDGRGDACDDDIDGDRIRNQADNCPRVPNSDQKDSDGDGIGDACDNCPQKSNPDQADVDHDFVGDACDSDQDQDGDGHQDSRDNCPTVPNSAQEDSDHDGQGDACDDDDDNDGVPDSRDNCRLVPNPGQEDADRDGVGDVCQDDFDADKVVDKIDVCPENAEVTLTDFRAFQTVVLDPEGDAQIDPNWVVLNQGREIVQTMNSDPGLAVGYTAFNGVDFEGTFHVNTVTDDDYAGFIFGYQDSSSFYVVMWKQMEQTYWQANPFRAVAEPGIQLKAVKSSTGPGEQLRNALWHTGDTESQVRLLWKDPRNVGWKDKKSYRWFLQHRPQVGYIRVRFYEGPELVADSNVVLDTTMRGGRLGVFCFSQENIIWANLRYRCNDTIPEDYETHQLRQA

SEQ ID NO: 293 - protein, 704 aa, Homo sapiens
MVPDTACVLLLTLAALGASGQGQSPLGSDLGPQMLRELQETNAALQDVRELLRQQVREITFLKNTVMECDACGMQQSVRTGLPSVRPLLHCAPGFCFPGVACIQTESGARCGPCPAGFTGNGSHCTDVNECETGQHNCVPNSVCINTRGSFQCGPCQPGFVGDQASGCQRRAQRFCPDGSPSECHEHADCVLERDGSRSCVCAVGWAGNGILCGRDTDLDGFPDEKLRCPERQCRKDNCVTVPNSGQEDVDRDGIGDACDPDADGDGVPNEKDNCPLVRNPDQRNTDEDKWGDACDNCRSQKNDDQKDTDQDGRGDACDDDIDGDRIRNQADNCPRVPNSDQKDSDGDGIGDACDNCPQKSNPDQADVDHDFVGDACDSDQDQDGDGHQDSRDNCPTVPNSAQEDSDHDGQGDACDDDDDNDGVPDSRDNCRLVPNPGQEDADRDGVGDVCQDDFDADKVVDKIDVCPENAEVTLTDFRAFQTVVLDPEGDAQIDPNWVVLNQGREIVQTMNSDPGLAVGYTAFNGVDFEGTFHVNTVTDDDYAGFIFGYQDSSSFYVVMWKQMEQTYWQANPFRAVAEPGIQLKAVKSSTGPGEQLRNALWHTGDTESQVRLLWKDPRNVGWKDKKSYRWFLQHRPQVGYIRVRFYEGPELVADSNVVLDTTMRGGRLGVFCFSQENIIWANLRYRCNDTIPEDYETHQLRQA

SEQ ID NO: 294 - protein, 724 aa, Homo sapiens
MLRELQETNAALQDVRELLRQQVREITFLKNTVMECDACGMQQSVRTGLPSVRPLLHCAPGFCFPGVACIQTESGARCGPCPAGFTGNGSHCTDVNECNAHPCFPRVRCINTSPGFRCEACPPGYSGPTHQGVGLAFAKANKQVCTDINECETGQHNCVPNSVCINTRGSFQCGPCQPGFVGDQASGCQRRAQRFCPDGSPSECHEHADCVLERDGSRSCVCAVGWAGNGILCGRDTDLDGFPDEKLRCPERQCRKDNCVTVPNSGQEDVDRDGIGDACDPDADGDGVPNEKDNCPLVRNPDQRNTDEDKWGDACDNCRSQKNDDQKDTDQDGRGDACDDDIDGDRIRNQADNCPRVPNSDQKDSDGDGIGDACDNCPQKSNPDQADVDHDFVGDACDSDQDQDGDGHQDSRDNCPTVPNSAQEDSDHDGQGDACDDDDDNDGVPDSRDNCRLVPNPGQEDADRDGVGDVCQDDFDADKVVDKIDVCPENAEVTLTDFRAFQTVVLDPEGDAQIDPNWVVLNQGREIVQTMNSDPGLAVGYTAFNGVDFEGTFHVNTVTDDDYAGFIFGYQDSSSFYVVMWKQMEQTYWQANPFRAVAEPGIQLKAVKSSTGPGEQLRNALWHTGDTESQVRLLWKDPRNVGWKDKKSYRWFLQHRPQVGYIRVRFYEGPELVADSNVVLDTTMRGGRLGVFCFSQENIIWANLRYRCNDTIPEDYETHQLRQA

SEQ ID NO: 295 - protein, 1332 aa, Homo sapiens
MESHSRAGKSRKSAKFRSISRSLMLCNAKTSDDGSSPDEKYPDPFEISLAQGKEGIFHSSVQLADTSEAGPSSVPDLALASEAAQLQAAGNDRGKTCRRIFFMKESSTASSREKPGKLEAQSSNFLFPKACHQRARSNSTSVNPYCTREIDFPMTKKSAAPTDRQPYSLCSNRKSLSQQLDCPAGKAAGTSRPTRSLSTAQLVQPSGGLQASVISNIVLMKGQAKGLGFSIVGGKDSIYGPIGIYVKTIFAGGAAAADGRLQEGDEILELNGESMAGLTHQDALQKFKQAKKGLLTLTVRTRLTAPPSLCSHLSPPLCRSLSSSTCITKDSSSFALESPSAPISTAKPNYRIMVEVSLQKEAGVGLGIGLCSVPYFQCISGIFVHTLSPGSVAHLDGRLRCGDEIVEISDSPVHCLTLNEVYTILSHCDPGPVPIIVSRHPDPQVSEQQLKEAVAQAVENTKFGKERHQWSLEGVKRLESSWHGRPTLEKEREKNSAPPHRRAQKVMIRSSSDSSYMSGSPGGSPGSGSAEKPSSDVDISTHSPSLPLAREPVVLSIASSRLPQESPPLPESRDSHPPLRLKKSFEILVRKPMSSKPKPPPRKYFKSDSDPQKSLEERENSSCSSGHTPPTCGQEARELLPLLLPQEDTAGRSPSASAGCPGPGIGPQTKSSTEGEPGWRRASPVTQTSPIKHPLLKRQARMDYSFDTTAEDPWVRISDCIKNLFSPIMSENHGHMPLQPNASLNEEEGTQGHPDGTPPKLDTANGTPKVYKSADSSTVKKGPPVAPKPAWFRQSLKGLRNRASDPRGLPDPALSTQPAPASREHLGSHIRASSSSSSIRQRISSFETFGSSQLPDKGAQRLSLQPSSGEAAKPLGKHEEGRFSGLLGRGAAPTLVPQQPEQVLSSGSPAASEARDPGVSESPPPGRQPNQKTLPPGPDPLLRLLSTQAEESQGPVLKMPSQRARSFPLTRSQSCETKLLDEKTSKLYSISSQVSSAVMKSLLCLPSSISCAQTPCIPKEGASPTSSSNEDSAANGSAETSALDTGFSLNLSELREYTEGLTEAKEDDDGDHSSLQSGQSVISLLSSEELKKLIEEVKVLDEATLKQLDGIHVTILHKEEGAGLGFSLAGGADLENKVITVHRVFPNGLASQEGTIQKGNEVLSINGKSLKGTTHHDALAILRQAREPRQAVIVTRKLTPEAMPDLNSSTDSAASASAASDVSVESTAEATVCTVTLEKMSAGLGFSLEGGKGSLHGDKPLTINRIFKGAASEQSETVQPGDEILQLGGTAMQGLTRFEAWNIIKALPDGPVTIVIRRKSLQSKETTAAGDS

SEQ ID NO: 296 - protein, 121 aa, Homo sapiens
SAASASAASDVSVESTAEATVCTVTLEKMSAGLGFSLEGGKGSLHGDKPLTINRIFKGAASEQSETVQPGDEILQLGGTAMQGLTRFEAWNIIKALPDGPVTIVIRRKSLQSKETTAAGDS

SEQ ID NO: 297 - protein, 1331 aa, Homo sapiens
MESHSRAGKSRKSAKFRSISRSLMLCNAKTSDDGSSPDEKYPDPFEISLAQGKEGIFHSSVQLADTSEAGPSSVPDLALASEAAQLQAAGNDRGKTCRRIFFMKESSTASSREKPGKLEAQSSNFLFPKACHQRARSNSTSVNPYCTREIDFPMTKKSAAPTDRQPYSLCSNRKSLSQQLDCPAGKAAGTSRPTRSLSTAQLVQPSGGLQASVISNIVLMKGQAKGLGFSIVGGKDSIYGPIGIYVKTIFAGGAAAADGRLQEGDEILELNGESMAGLTHQDALQKFKQAKKGLLTLTVRTRLTAPPSLCSHLSPPLCRSLSSSTCITKDSSSFALESPSAPISTAKPNYRIMVEVSLQKEAGVGLGIGLCSVPYFQCISGIFVHTLSPGSVAHLDGRLRCGDEIVEISDSPVHCLTLNEVYTILSHCDPGPVPIIVSRHPDPQVSEQQLKEAVAQAVENTKFGKERHQWSLEGVKRLESSWHGRPTLEKEREKNSAPPHRRAQKVMIRSSSDSSYMSGSPGGSPGSGSAEKPSSDVDISTHSPSLPLAREPVVLSIASSRLPQESPPLPESRDSHPPLRLKKSFEILVRKPMSSKPKPPPRKYFKSDSDPQKSLEERENSSCSSGHTPPTCGQEARELLPLLLPQEDTAGRSPSASAGCPGPGIGPQTKSSTEGEPGWRRASPVTQTSPIKHPLLKRQARMDYSFDTTAEDPWVRISDCIKNLFSPIMSENHGHMPLQPNASLNEEEGTQGHPDGTPPKLDTANGTPKVYKSADSSTVKKGPPVAPKPAWFRQSLKGLRNRASDPRGLPDPALSTQPAPASREHLGSHIRASSSSSSIRQRISSFETFGSSQLPDKGAQRLSLQPSSGEAAKPLGKHEEGRFSGLLGRGAAPTLVPQQPEQVLSSGSPAASEARDPGVSESPPPGRQPNQKTLPPGPDPLLRLLSTQAEESQGPVLKMPSQRARSFPLTRSQSCETKLLDEKTSKLYSISSQVSSAVMKSLLCLPSSISCAQTPCIPKEGASPTSSSNEDSAANGSAETSALDTGFSLNLSELREYTEGLTEAKEDDDGDHSSLQSGQSVISLLSSEELKKLIEEVKVLDEATLKQLDGIHVTILHKEEGAGLGFSLAGGADLENKVITVHRVFPNGLASQEGTIQKGNEVLSINGKSLKGTTHHDALAILRQAREPRQAVIVTRKLTPEAMPDLNSSTDSAASASAASDVSVESTEATVCTVTLEKMSAGLGFSLEGGKGSLHGDKPLTINRIFKGAASEQSETVQPGDEILQLGGTAMQGLTRFEAWNIIKALPDGPVTIVIRRKSLQSKETTAAGDS

SEQ ID NO: 298 - protein, 631 aa, Homo sapiens
MDYSFDTTAEDPWVRISDCIKNLFSPIMSENHGHMPLQPNASLNEEEGTQGHPDGTPPKLDTANGTPKVYKSADSSTVKKGPPVAPKPAWFRQSLKGLRNRASDPRGLPDPALSTQPAPASREHLGSHIRASSSSSSIRQRISSFETFGSSQLPDKGAQRLSLQPSSGEAAKPLGKHEEGRFSGLLGRGAAPTLVPQQPEQVLSSGSPAASEARDPGVSESPPPGRQPNQKTLPPGPDPLLRLLSTQAEESQGPVLKMPSQRARSFPLTRSQSCETKLLDEKTSKLYSISSQVSSAVMKSLLCLPSSISCAQTPCIPKEGASPTSSSNEDSAANGSAETSALDTGFSLNLSELREYTEGLTEAKEDDDGDHSSLQSGQSVISLLSSEELKKLIEEVKVLDEATLKQLDGIHVTILHKEEGAGLGFSLAGGADLENKVITVHRVFPNGLASQEGTIQKGNEVLSINGKSLKGTTHHDALAILRQAREPRQAVIVTRKLTPEAMPDLNSSTDSAASASAASDVSVESTAEATVCTVTLEKMSAGLGFSLEGGKGSLHGDKPLTINRIFKGAASEQSETVQPGDEILQLGGTAMQGLTRFEAWNIIKALPDGPVTIVIRRKSLQSKETTAAGDS

SEQ ID NO: 299 - protein, 560 aa, Homo sapiens
MDYSFDTTAEDPWVRISDCIKNLFSPIMSENHGHMPLQPNASLNEEEGTQGHPDGTPPKLDTANGTPKVYKSADSSTVKKGPPVAPKPAWFRQSLKGLRNRASDPRGLPDPALSTQPAPASREHLGSHIRASSSSSSIRQRISSFETFGSSQLPDKGAQRLSLQPSSGEAAKPLGKHEEGRFSGLLGRGAAPTLVPQQPEQVLSSGSPAASEARDPGVSESPPPGRQPNQKTLPPGPDPLLRLLSTQAEESQGPVLKMPSQRARSFPLTRSQSCETKLLDEKTSKLYSISSQVSSAVMKSLLCLPSSISCAQTPCIPKEGASPTSSSNEDSAANGSAETSALDTGFSLNLSELREYTEGLTEAKEDDDGDHSSLQSGQSVISLLSSEELKKLIEEVKVLDEATLKQLDGIHVTILHKEEGAGLGFSLAGGADLENKVITVHRVFPNGLASQEGTIQKGNEVLSINGKSLKGTTHHDALAILRQAREPRQAVIVTRKLTPEAMPDLNSSTDSAASASAASDVSVESTEATVCTVTLEDVGRAGLQPGRREGLPTRRQASHH

SEQ ID NO: 300 - protein, 911 aa, Homo sapiens
MDGAMGPRGLLLCMYLVSLLILQAMPALGSATGRSKSSEKRQAVDTAVDGVFIRSLKVNCKVTSRFAHYVVTSQVVNTANEAREVAFDLEIPKTAFISDFAVTADGNAFIGDIKDKVTAWKQYRKAAISGENAGLVRASGRTMEQFTIHLTVNPQSKVTFQLTYEEVLKRNHMQYEIVIKVKPKQLVHHFEIDVDIFEPQGISKLDAQASFLPKELAAQTIKKSFSGKKGHVLFRPTVSQQQSCPTCSTSLLNGHFKVTYDVSRDKICDLLVANNHFAHFFAPQNLTNMNKNVVFVIDISGSMRGQKVKQTKEALLKILGDMQPGDYFDLVLFGTRVQSWKGSLVQASEANLQAAQDFVRGFSLDEATNLNGGLLRGIEILNQVQESLPELSNHASILIMLTDGDPTEGVTDRSQILKNVRNAIRGRFPLYNLGFGHNVDFNFLEVMSMENNGRAQRIYEDHDATQQLQGFYSQVAKPLLVDVDLQYPQDAVLALTQNHHKQYYEGSEIVVAGRIADNKQSSFKADVQAHGEGQEFSITCLVDEEEMKKLLRERGHMLENHVERLWAYLTIQELLAKRMKVDREERANLSSQALQMSLDYGFVTPLTSMSIRGMADQDGLKPTIDKPSEDSPPLEMLGPRRTFVLSALQPSPTHSSSNTQRLPDRVTGVDTDPHFIIHVPQKEDTLCFNINEEPGVILSLVQDPNTGFSVNGQLIGNKARSPGQHDGTYFGRLGIANPATDFQLEVTPQNITLNPGFGGPVFSWRDQAVLRQDGVVVTINKKRNLVVSVDDGGTFEVVLHRVWKGSSVHQDFLGFYVLDSHRMSARTHGLLGQFFHPIGFEVSDIHPGSDPTKPDATMVVRNRRLTVTRGLQKDYSKDPWHGAEVSCWFIHNNGAGLIDGAYTDYIVPDIF

SEQ ID NO: 301 - protein, 638 aa, Homo sapiens
SKSSEKRQAVDTAVDGVFIRSLKVNCKVTSRFAHYVVTSQVVNTANEAREVAFDLEIPKTAFISDFAVTADGNAFIGDIKDKVTAWKQYRKAAISGENAGLVRASGRTMEQFTIHLTVNPQSKVTFQLTYEEVLKRNHMQYEIVIKVKPKQLVHHFEIDVDIFEPQGISKLDAQASFLPKELAAQTIKKSFSGKKGHVLFRPTVSQQQSCPTCSTSLLNGHFKVTYDVSRDKICDLLVANNHFAHFFAPQNLTNMNKNVVFVIDISGSMRGQKVKQTKEALLKILGDMQPGDYFDLVLFGTRVQSWKGSLVQASEANLQAAQDFVRGFSLDEATNLNGGLLRGIEILNQVQESLPELSNHASILIMLTDGDPTEGVTDRSQILKNVRNAIRGRFPLYNLGFGHNVDFNFLEVMSMENNGRAQRIYEDHDATQQLQGFYSQVAKPLLVDVDLQYPQDAVLALTQNHHKQYYEGSEIVVAGRIADNKQSSFKADVQAHGEGQEFSITCLVDEEEMKKLLRERGHMLENHVERLWAYLTIQELLAKRMKVDREERANLSSQALQMSLDYGFVTPLTSMSIRGMADQDGLKPTIDKPSEDSPPLEMLGPRRTFVLSALQPSPTHSSSNTQRLPDRVTGVDTD

SEQ ID NO: 302 - protein, 239 aa, Homo sapiens
PHFIIHVPQKEDTLCFNINEEPGVILSLVQDPNTGFSVNGQLIGNKARSPGQHDGTYFGRLGIANPATDFQLEVTPQNITLNPGFGGPVFSWRDQAVLRQDGVVVTINKKRNLVVSVDDGGTFEVVLHRVWKGSSVHQDFLGFYVLDSHRMSARTHGLLGQFFHPIGFEVSDIHPGSDPTKPDATMVVRNRRLTVTRGLQKDYSKDPWHGAEVSCWFIHNNGAGLIDGAYTDYIVPDIF

SEQ ID NO: 303 - protein, 769 aa, Homo sapiens
MEQFTIHLTVNPQSKVTFQLTYEEVLKRNHMQYEIVIKVKPKQLVHHFEIDVDIFEPQGISKLDAQASFLPKELAAQTIKKSFSGKKGHVLFRPTVSQQQSCPTCSTSLLNGHFKVTYDVSRDKICDLLVANNHFAHFFAPQNLTNMNKNVVFVIDISGSMRGQKVKQTKEALLKILGDMQPGDYFDLVLFGTRVQSWKGSLVQASEANLQAAQDFVRGFSLDEATNLNGGLLRGIEILNQVQESLPELSNHASILIMLTDGDPTEGVTDRSQILKNVRNAIRGRFPLYNLGFGHNVDFNFLEVMSMENNGRAQRIYEDHDATQQLQGFYSQVAKPLLVDVDLQYPQDAVLALTQNHHKQYYEGSEIVVAGRIADNKQSSFKADVQAHGEGQEFSITCLVDEEEMKKLLRERGHMLENHVERLWAYLTIQELLAKRMKVDREERANLSSQALQMSLDYGFVTPLTSMSIRGMADQDGLKPTIDKPSEDSPPLEMLGPRRTFVLSALQPSPTHSSSNTQRLPDRVTGVDTDPHFIIHVPQKEDTLCFNINEEPGVILSLVQDPNTGFSVNGQLIGNKARSPGQHDGTYFGRLGIANPATDFQLEVTPQNITLNPGFGGPVFSWRDQAVLRQDGVVVTINKKRNLVVSVDDGGTFEVVLHRVWKGSSVHQDFLGFYVLDSHRMSARTHGLLGQFFHPIGFEVSDIHPGSDPTKPDATMVVRNRRLTVTRGLQKDYSKDPWHGAEVSCWFIHNNGAGLIDGAYTDYIVPDIF

SEQ ID NO: 304 - protein, 623 aa, Homo sapiens
MNKNVVFVIDISGSMRGQKVKQTKEALLKILGDMQPGDYFDLVLFGTRVQSWKGSLVQASEANLQAAQDFVRGFSLDEATNLNGGLLRGIEILNQVQESLPELSNHASILIMLTDGDPTEGVTDRSQILKNVRNAIRGRFPLYNLGFGHNVDFNFLEVMSMENNGRAQRIYEDHDATQQLQGFYSQVAKPLLVDVDLQYPQDAVLALTQNHHKQYYEGSEIVVAGRIADNKQSSFKADVQAHGEGQEFSITCLVDEEEMKKLLRERGHMLENHVERLWAYLTIQELLAKRMKVDREERANLSSQALQMSLDYGFVTPLTSMSIRGMADQDGLKPTIDKPSEDSPPLEMLGPRRTFVLSALQPSPTHSSSNTQRLPDRVTGVDTDPHFIIHVPQKEDTLCFNINEEPGVILSLVQDPNTGFSVNGQLIGNKARSPGQHDGTYFGRLGIANPATDFQLEVTPQNITLNPGFGGPVFSWRDQAVLRQDGVVVTINKKRNLVVSVDDGGTFEVVLHRVWKGSSVHQDFLGFYVLDSHRMSARTHGLLGQFFHPIGFEVSDIHPGSDPTKPDATMVVRNRRLTVTRGLQKDYSKDPWHGAEVSCWFIHNNGAGLIDGAYTDYIVPDIF

1. A method for predicting the risk of occurrence of acute kidney injury (AKI) or for early diagnosis of AKI in a subject, comprising the steps of:
a. determining in a sample obtained from the subject the amount of at least one biomarker being selected from the group consisting of Nuclear factor of activated T-cells, Interferon alpha-1/13 and Myeloblastin, as well as isoforms, fragments and variants thereof,
b. comparing the amount of said at least one biomarker with a reference amount for said at least one biomarker, wherein the reference amount is the amount of the respective biomarker in healthy subjects, such as subjects who are not at risk of developing AKI and/or who do not have AKI, and
c. changing a therapy plan prior and/or during and/or after surgery of the subject when a risk of AKI is predicted or when an early diagnosis of AKI is made.

2. The method according to claim 1, wherein a reduced amount of the at least one biomarker compared to the reference amount indicates that the subject has AKI or is at risk of developing AKI.

3. (canceled)

4. The method according to claim 1, wherein the Nuclear factor of activated T-cells is Nuclear factor of activated T-cells cytoplasmic 4, or isoforms, fragments or variants thereof.

5. The method according to claim 1, including determining in the sample the amount of at least Interferon alpha-1/13 and Myeloblastin, or isoforms, fragments or variants thereof.

6. The method according to claim 1, including determining in the sample the amount of at least Nuclear factor of activated T-cells and Interferon alpha-1/13, or isoforms, fragments or variants thereof.

7. The method according to claim 1, including determining in the sample the amount of Nuclear factor of activated T-cells and Hyaluronan mediated motility receptor, or isoforms, fragments or variants thereof.

8. The method according to claim 1, wherein the sample is a urine, blood, plasma or serum sample.

9. The method according to claim 1, wherein the sample is taken prior to a planned medical intervention such as administration of a drug, avoiding administration of a drug, injection of contrast media or a surgical intervention.

10. The method according to claim 1, wherein one, two, three or more further biomarkers are determined in the sample, wherein the further biomarkers are selected from one or more of the protein biomarkers, male patient biomarkers, predictive biomarkers, diagnostic biomarkers, or combined predictive and diagnostic biomarkers, wherein
the protein biomarkers are CD9 antigen, Prostaglandin G/H synthase 2, CD15, CD99 antigen, CD99R antigen, High affinity immunoglobulin epsilon receptor subunit alpha, ligands of Tumor necrosis factor receptor superfamily member 1B including Tumor necrosis factor and Lymphotoxin-alpha, Tumor necrosis factor receptor superfamily member 6, Interferon alpha-1/13, Basigin, C-C motif, chemokine 7, Dickkopf-related protein 2, Hyaluronan mediated motility receptor, Interleukin-18, Interleukin-7, Major prion protein, Receptor-type tyrosine-protein phosphatase C, P-selectin glycoprotein ligand 1, Tumor necrosis factor ligand superfamily member 14, DNA topoisomerase 2-alpha, Brain-derived neurotrophic factor, Caspase-8, Eotaxin, C-C motif chemokine 3, C-C motif chemokine 5, Monocyte differentiation antigen CD14, Cytokine receptor-like factor 2, Lamin-B1, Cellular tumor antigen p53, Serine/threonine-protein kinase PAK 1, Caspase-9, Transforming growth factor-beta-induced protein ig-h3, Leukocyte surface antigen CD47, T-cell surface glycoprotein CD8 alpha chain, Dickkopf-related protein 3, Growth arrest-specific protein 6, Interleukin-15, Cytokine receptor common subunit beta, Keratin, type II cytoskeletal 8, Leukosialin, MAP/microtubule affinity-regulating kinase 4, Melanophilin, Interstitial collagenase, Matrilysin, Prostaglandin G/H synthase 1, Myeloblastin, RNA-binding protein 3, Serum amyloid P-component, Tetraspanin-16, Urokinase-type plasminogen activator, CTP synthase 1, CD139, Max dimerization protein 4, Transmembrane protein 54, Actin, cytoplasmic 1, Caspase-3, Complement decay-accelerating factor, High mobility group protein B2, Homeobox protein, Hox-C11, Intercellular adhesion molecule 1, Interleukin-12 subunit alpha, Krueppel-like factor 8, Galectin-4, Ragulator complex protein LAMTOR1, L-selectin, Mitogen-activated protein kinase 3, Mucin-5B, Nuclear factor of activated T-cells, Transforming growth factor beta-1 proprotein, Serine/threonine-protein kinase VRK1, Cyclin-dependent kinase inhibitor 3, Tissue factor pathway inhibitor 2, Microtubule-associated proteins 1A/1B light chain 3B, Phosphatidylinositol 3,4,5-trisphosphate 3-phosphatase and dual-specificity protein phosphatase PTEN, Interleukin-8, Rho guanine nucleotide exchange factor 2, CASP8 and FADD-like apoptosis regulator, CUE domain-containing protein 2, Death-associated protein kinase 1, Endothelin-1 receptor, Eukaryotic translation initiation factor 3 subunit B, DNA-binding protein inhibitor ID-2, Prelamin-A/C, CAD protein, Zinc finger protein 593, Mitogen-activated protein kinase 12, Cytochrome P450 1B1, Angiotensinogen, Adenomatous polyposis coli protein, POU domain class 2 transcription factor 1, Somatostatin receptor type 4, Tumor necrosis factor alpha-induced protein 3, E3 ubiquitin-protein ligase TRIM22, Complement factor D, Neurotrophin-4, Insulin-like growth factor-binding protein 1, Cystatin-B, Interleukin-18-binding protein, WAP four-disulfide core domain protein 2, Haptoglobin, Uteroglobin, Chitinase-3-like protein 1, Elafin, Cartilage oligomeric matrix protein, Interleukin-16 and Inter-alpha-trypsin inhibitor heavy chain H1 (SEQ ID No. 1 to 304, CD15, CD139) as well as isoforms, fragments and variants thereof,
the male patient biomarkers are CD15, ligands of Tumor necrosis factor receptor superfamily member 1B including Tumor necrosis factor and Lymphotoxin-alpha, Lamin-B1, MAP/microtubule affinity-regulating kinase 4, Dickkopf-related protein 2, Krueppel-like factor 8, Rho guanine nucleotide exchange factor 2, CUE domain-containing protein 2, Death-associated protein kinase 1, DNA-binding protein inhibitor ID-2, Prelamin-A/C, Adenomatous polyposis coli protein, POU domain class 2 transcription factor 1, Somatostatin receptor type 4, and Tumor necrosis factor alpha-induced protein 3 as well as isoforms, fragments and variants thereof,
the predictive biomarkers are CD15, CD99 antigen, CD99R antigen, High affinity immunoglobulin epsilon receptor subunit alpha, Ligands of Tumor necrosis factor receptor superfamily member 1B including Tumor necrosis factor and Lymphotoxin-alpha, Tumor necrosis factor receptor superfamily member 6, Basigin, C-C motif chemokine 7, CD9 antigen, Dickkopf-related protein 2, Hyaluronan mediated motility receptor, Interleukin-18, Interleukin-7, Major prion protein, Receptor-type tyrosine-protein phosphatase C, P-selectin glycoprotein ligand 1, Tumor necrosis factor ligand superfamily member 14, DNA topoisomerase 2-alpha, Brain-derived neurotrophic factor, Caspase-8, Eotaxin, C-C motif chemokine 3, C-C motif chemokine 5, Monocyte differentiation antigen CD14, Cytokine receptor-like factor 2, Lamin-B1, Cellular tumor antigen p53, Serine/threonine-protein kinase PAK 1, Transforming growth factor-beta-induced protein ig-h3, Leukocyte surface antigen CD47, T-cell surface glycoprotein CD8 alpha chain, Dickkopf-related protein 3, Growth arrest-specific protein 6, Interferon alpha-1/13, Interleukin-15, Cytokine receptor common subunit beta, Keratin type II cytoskeletal 8, Leukosialin, MAP/microtubule affinity-regulating kinase 4, Melanophilin, Interstitial collagenase, Matrilysin, Prostaglandin G/H synthase 1, Myeloblastin, RNA-binding protein 3, Serum amyloid P-component, Tetraspanin-16, Urokinase-type plasminogen activator, Actin cytoplasmic 1, Caspase-3, Complement decay-accelerating factor, High mobility group protein B2, Homeobox protein Hox-C11, Intercellular adhesion molecule 1, Interleukin-12 subunit alpha, Interleukin-8, Krueppel-like factor 8, Galectin-4, Ragulator complex protein, LAMTOR1, L-selectin, Mitogen-activated protein kinase 3, Mucin-5B, Nuclear factor of activated T-cells cytoplasmic 4, Transforming growth factor beta-1 proprotein, Serine/threonine-protein kinase VRK1, Rho guanine nucleotide exchange factor, CASP8 and FADD-like apoptosis regulator, CUE domain-containing protein 2, Death-associated protein kinase 1, Endothelin-1 receptor, Eukaryotic translation initiation factor 3 subunit, DNA-binding protein inhibitor ID-2, Prelamin-A/C, CAD protein, Zinc finger protein 593, Angiotensinogen, Adenomatous polyposis coli protein, POU domain, class 2, transcription factor 1, Somatostatin receptor type 4, Tumor necrosis factor alpha-induced protein 3, Neurotrophin-4, Interleukin-18-binding protein, Interleukin-16 and Inter-alpha-trypsin inhibitor heavy chain H1, as well as isoforms, fragments and variants thereof;
the diagnostic biomarkers are Cytokine receptor-like factor 2, Prostaglandin G/H synthase 2, Interferon alpha-1/13, Caspase-9, Interleukin-18, Interleukin-7, CTP synthase 1, C-C motif chemokine 7, CD139, Eotaxin, Max dimerization protein 4, Interleukin-15, RNA-binding protein 3, Transmembrane protein 54, Krueppel-like factor 8, Interstitial collagenase, Cyclin-dependent kinase inhibitor 3, Tissue factor pathway inhibitor 2, Growth arrest-specific protein 6, Microtubule-associated proteins 1A/1B light chain 3B, Caspase-8, Phosphatidylinositol 3,4,5-trisphosphate 3-phosphatase and dual-specificity protein phosphatase PTEN, Mitogen-activated protein kinase 12, Cytochrome P450 1B1, and E3 ubiquitin-protein ligase TRIM22, Complement factor D, Insulin-like growth factor-binding protein 1, Cystatin-B, WAP four-disulfide core domain protein 2, Haptoglobin, Uteroglobin, Chitinase-3-like protein 1, Elafin and Cartilage oligomeric matrix protein, as well as isoforms, fragments and variants thereof,
the combined predictive and diagnostic biomarkers are Cytokine receptor-like factor 2, Caspase-8, Eotaxin, C-C motif chemokine 7, Growth arrest-specific protein 6, Interferon alpha-1/13, Interleukin-15, Interleukin-18, Interleukin-7, Krueppel-like factor 8, Interstitial collagenase, and RNA-binding protein 3 as well as isoforms, fragments and variants thereof.

11. The method according to claim 1, wherein the fragments, isoforms and/or variants of the biomarkers have at least 70%, at least 80%, at least 90%, at least 95%, at least 98%, or at least 99% sequence identity with the biomarker over the whole length of the sequence.

12. The method according to claim 1, wherein determining the amount of said at least one biomarker comprises using an immunoassay device, such as ELISA (enzyme-linked immunosorbent assay) or antibody array, in particular a planar antibody microarray or a bead based antibody microarray.

13-15. (canceled)

16. The method according to claim 1, wherein the changed therapy plan prior and/or during and/or after surgery is selected from the group consisting of applying renal dialysis, AKI risk factor management, avoiding nephrotoxic drugs and measures, administration of kidney-stabilizing drugs and measures, administration of drugs and measures preventing AKI, drugs alleviating or reversing AKI effects or drugs and measures preventing further development of AKI into CKD, avoiding anemia, avoiding hypovolemia, avoiding renal hypoperfusion, cardiac output monitoring, avoiding allogeneic blood transfusion, avoiding nephrotoxic drugs such as antibiotics, etc., avoid radiocontrast agents, before and after surgery optimization of the strategy of the surgical intervention, and stringent observation of the patient possibly leading to earlier intervention, as well as any combination thereof.
